(19) United States
(12) Patent Application Publication
(10) Pub. No.: US 2021/0284732 A1
(43) Pub. Date: Sep. 16, 2021

(54) DOSING REGIMEN FOR BCMA-CD3 BISPECIFIC ANTIBODIES

(71) Applicants: AMGEN RESEARCH (MUNICH) GMBH, Munich (DE); AMGEN INC., Thousand Oaks, CA (US)

(72) Inventors: Gerhard Zugmaier, Munich (DE); Max Topp, Würzburg (DE); Gerd Munzert, Ingelheim am Rhein (DE)

(21) Appl. No.: 17/264,386

(22) PCT Filed: Jul. 30, 2019
(86) PCT No.: PCT/EP2019/070455

§ 371 Date: Jan. 29, 2021

Related U.S. Application Data
(60) Provisional application No. 62/712,357, filed on Jul. 31, 2018.

(51) Int. Cl. C07K 16/28

(52) U.S. Cl. CPC C07K 16/2809; A61K 2039/505; C07K 16/2878

(57) ABSTRACT

The present disclosure relates to an antibody construct comprising a first domain which binds to BCMA and a second domain which binds to CD3, for use in the treatment or amelioration of a BCMA positive neoplasm, wherein the antibody construct is administered at a specified dose in at least one cycle, wherein one cycle comprises a specified period of administration of the antibody construct. Moreover, the disclosure relates to a method for the treatment of a BCMA positive neoplasm comprising administering a specified amount of such antibody construct, and the use of such antibody construct for the manufacture of a medicament for the treatment of a BCMA positive neoplasm.

[0001] The present invention relates to an antibody construct comprising a first domain which binds to BCMA and a second domain which binds to CD3, for use in the treatment or amelioration of a BCMA positive neoplasm, wherein the antibody construct is administered at a specified dose in at least one cycle, wherein one cycle comprises a specified period of administration of the antibody construct. Moreover, the invention relates to a method for the treatment of a BCMA positive neoplasm comprising administering a specified amount of such antibody construct, and the use of such antibody construct for the manufacture of a medicament for the treatment of a BCMA positive neoplasm.

### BACKGROUND OF THE INVENTION

[0002] Multiple Myeloma (MM) is a malignant tumor of plasma cells which proliferate in bone marrow and release para protein. The resulting clinical laboratory pictures include infection, bone destruction, bone marrow failure, renal failure and hypercalcemia. The age adjusted annual incidence is increasing with approximately 6 new cases per 100,000. The incidence 2 times higher in the black US population than in Caucasians. The 5-year survival rate for MM has increased from ˜25% for newly diagnosed patients in 1975 to ˜45% in 2006. This improvement is mainly due to new drugs such as proteasome inhibitors and immunomodulators. However, MM is not considered curable with current approaches. Patients refractory to proteasome inhibitors and immunomodulators show an unfavorable outcome with a median overall survival of 9 months.

[0003] Outcome is particularly poor in high-risk populations such as the subgroup with del17p13 positive MM. Although many drugs are in clinical development for MM, new treatment options are still needed. Patients who show symptomatic disease are initially treated with primary induction therapy followed by high dose chemotherapy with autologous stem cell support in eligible patients. Patients eligible for intensive treatment are determined by age (65 to 75 years as upper limit), no comorbidities and intact renal function. Although this regimen has improved survival of younger and fit patients, the median duration of response does not exceed 3 years, and few patients remain free of the disease for more than 10 years.

[0004] Consolidation and maintenance approaches have been tested in order to increase the depth and duration of remission. Because maintenance treatment is challenging due to no efficacy or tolerability, there is still the option of improving survival outcome in the transplant setting by adding novel treatments to induction, consolidation or maintenance regimens. Patients not eligible for high dose therapy commonly receive induction regimens similar to the ones for the transplant candidates. These regimens include the proteasome inhibitor Bortezomib or a Melphalan based combination with Thalidomide. Median overall survival (OS) of Melphalan-Thalidomide-Prednisone (MPT) in elderly patients is 40 months. Lenalidomide in combination with Dexamethasone is the standard regimen for relapsed/refractory MM, but may move to the first line setting in transplant ineligible patients.

[0005] Other established regimens in the relapsed setting are repeat induction regimens or bortezomib or immunomodulator based salvage combinations with alkylating agents. An improvement of outcome (progression-free survival (PFS) and OS) is needed for patients in relapsed disease. Patients which are refractory to established treatments and progressing on treatment have a dismal outcome of 9 months OS on treatment and 3 months without treatment. The unmet need is highest in these patients.

[0006] Bispecific molecules such as BiTE® (bispecific T cell engager) antibody constructs are recombinant protein constructs having one binding domain that is specific for a selected tumor-associated surface antigen on target cells, and a second binding domain that is specific for CD3, a subunit of the T cell receptor complex on T cells. By their particular design, BiTE® antibody constructs are uniquely suited to transiently connect T cells with target cells and, at the same time, potently activate the inherent cytolytic potential of T cells against target cells. The first generation of BiTE® antibody constructs (see WO 99/54440 and WO 2005/040220) was brought into the clinic as AMG 103 (blinatumomab, anti-CD19×anti-CD3) and AMG 110 (solitomab, anti-EpCAM×anti-CD3). Blinatumomab, which is approved for patients with ALL, is administered via continuous intravenous infusion, with a lower initial dose in the first period of administration and a higher dose in the remaining treatment, during the first cycle and in all subsequent cycles. In a comparison of step dosing versus constant (flat) dosing as a means to reach the target dose of blinatumomab, step dosing was found to be more effective at mitigating adverse events. In view of the positive efficacy signal and favorable safety profile, a similar administration scheme has hence been used for solitomab which was also administered with increasing doses in each cycle. An important further development of the first generation of BiTE® antibody constructs was the provision of bispecific antibody constructs binding to a context independent epitope at the N-terminus of the CD3-epsilon chain of human and Callithrix jacchus, Saguinus oedipus or Saimiri sciureus (WO 2008/119567). The first BiTE® molecule comprising this new CD3-epsilon binding domain that was tested in the clinic was AMG 330. In line with the previously used administration schemes, where the initiation of treatment with a lower dose before escalation to the target dose reduced the magnitude of cytokine elevation, AMG 330 was also administered with a step dosing regimen. The administration of a lower dose of an anti-target×anti-CD3 antibody construct in the first dose step is understood as a run-in phase or adaptation phase which should avoid or limit side effects resulting from the first contact of the patient with the antibody construct.

[0007] B cell maturation antigen (BCMA, TNFRSF17, CD269) is a transmembrane protein belonging to the TNF receptor super family. BCMA expression is selectively induced during late stage plasma cell differentiation and is absent on naïve and memory B cells. Upon BCMA binding to its ligands, B cell activating factor (BAFF) and a proliferation inducing ligand (APRIL), the survival of the bone marrow plasma cells and plasmablasts is promoted. BCMA does not maintain normal B cell homeostasis, but is required for the survival of long lived plasma cells. Studies in BCMA−/− mice showed that the survival of long lived bone marrow plasma cells was impaired, but B cell development and early humoral immune responses were indistinguishable from wild type mice. The mRNA expression of BCMA is highly elevated in malignant plasma cell disorders. By contrast, mRNA expression in normal tissues is very low and restricted to lymphoid tissues where normal long-lived plasma cells are located. BCMA protein expression is reported to be restricted to plasma cells only. Expression of BCMA is confined to plasma blasts and long-lived plasma cells and cannot be detected on other normal human tissues. BCMA is universally expressed on the cell surface of MM cells and at relatively higher levels on malignant plasma cells than the level observed on normal plasma cells. There is no correlation between BCMA expression and MM disease stage, response to last treatment and time from diagnosis. Neither T cells nor myeloid cells or CD34+ hematopoietic stem cells express BCMA. The selective expression of BCMA makes it a very attractive target for antibody-based and chimeric antigen receptor (CAR)-based therapies.

### DETAILED DESCRIPTION OF THE INVENTION

[0008] AMG 420 (formerly BI 836909) is a bispecific T cell engager which binds to BCMA on target cells as well as to CD3-epsilon on T cells. It functions as a bridge between MM cells and cytotoxic T lymphocytes (CTLs) by directing the cytolytic activity of CTLs to MM cells. AMG 420 consists of two single chain variable fragments (scFv), one being directed to BCMA and the other one to CD3. Each of the scFv fragments consists of a VH and a VL domain connected with a glycine/serine linker. The two scFv fragments are also connected with a glycine/serine linker.

[0009] The inventors surprisingly found that in the case of the anti-BCMA×anti-CD3 antibody construct, it is most beneficial for an MM patient that the target dose in the patient's serum is reached without delay. It is believed that the faster the target dose is achieved in the patient, the faster the onset of response. This can be demonstrated by the quick onset of CR in ALL, a tumor in bone marrow, which can be easily reached by the T cells (Stackelberg et al. JCO 2016). On the other hand, if it takes longer for the antibody construct to reach its therapeutically effective dose in a patient's body (e.g. due to step dosing), the antibody construct seems to be less efficient. Without wanting to be bound by the theory, the inventors believe that this phenomenon is related to T cell expansion and T cell redistribution.

[0010] It is hence an object of the present invention to provide an administration scheme for an anti-BCMA×anti-CD3 antibody construct which provides for a favorable safety and tolerability profile while resulting in a positive efficacy signal.

[0011] The present invention therefore relates to an antibody construct comprising a first domain which binds to BCMA and a second domain which binds to CD3, for use in the treatment or amelioration of a BCMA positive neoplasm, wherein the antibody construct is administered at a dose of 6.5 μg/day up to 650 μg/day in at least one cycle, wherein one cycle comprises a period of administration of the antibody construct of at least seven consecutive days.

[0012] Moreover, the invention relates to a method for the treatment or amelioration of a BCMA positive neoplasm, comprising administering an antibody construct comprising a first domain which binds to BCMA and a second domain which binds to CD3 to a subject in need thereof, wherein the antibody construct is administered at a dose of 6.5 μg/day up to 650 μg/day in at least one cycle, wherein one cycle comprises a period of administration of the antibody construct of at least seven consecutive days.

[0013] The invention further relates to the use of an antibody construct comprising a first domain which binds to BCMA and a second domain which binds to CD3 for the manufacture of a medicament for the treatment of a BCMA positive neoplasm, wherein the antibody construct is administered at a dose of 6.5 μg/day up to 650 μg/day in at least one cycle, wherein one cycle comprises a period of administration of the antibody construct of at least seven consecutive days.

[0014] The invention also relates to the use of an antibody construct comprising a first domain which binds to BCMA and a second domain which binds to CD3 for the treatment or amelioration of a BCMA positive neoplasm, wherein the antibody construct is administered at a dose of 6.5 μg/day up to 650 μg/day in at least one cycle, wherein one cycle comprises a period of administration of the antibody construct of at least seven consecutive days.

[0015] A “neoplasm” is an abnormal growth of tissue, usually but not always forming a mass. When also forming a mass, it is commonly referred to as a “tumor”. In brain tumors, the uncontrolled division of cells means that the mass of a neoplasm increases in size, and in a confined space such as the intracranial cavity this quickly becomes problematic because the mass invades the space of the brain pushing it aside, leading to compression of the brain tissue and increased intracranial pressure and destruction of parenchyma. According to the invention, the term “neoplasm” or “tumor” also refers to a condition that would benefit from treatment with the antibody construct as described herein. This includes chronic and acute disorders or diseases, including those pathological conditions that predispose a mammal to the condition (neoplasm or tumor) in question.

[0016] Neoplasms or tumors can be benign, potentially malignant (pre-cancerous), or malignant (cancerous). Malignant neoplasms/tumors are commonly called cancer. They usually invade and destroy the surrounding tissue and may form metastases, i.e., they spread to other parts, tissues or organs of the body. A “primary tumor” is a tumor growing at the anatomical site where tumor progression began and proceeded to yield a cancerous mass. For example, a brain tumor occurs when abnormal cells form within the brain. Most cancers develop at their primary site but then go on to form metastases or spread to other parts (e.g. tissues and organs) of the body. These further tumors are secondary tumors. Most cancers continue to be called after their primary site, even after they have spread to other parts of the body.

[0017] Lymphomas and leukemias are hematopoietic or lymphoid neoplasms. For the purposes of the present invention, lymphomas and leukemias are also encompassed by the terms “tumor”, “cancer” or “neoplasm”. Lymphoma is a group of blood cancers that develop from lymphocytes (a type of white blood cell). Leukemia is a group of cancers that usually begin in the bone marrow and result in high numbers of abnormal white blood cells. These white blood cells are not fully developed and are called blasts or leukemia cells. Lymphomas and leukemias are a part of the broader group of tumors of the hematopoietic and lymphoid tissues.

[0018] For the purposes of the present invention, the terms “neoplasm”, “tumor” and “cancer” may be used interchangeably, and they comprise both primary tumors/cancers and secondary tumors/cancers (or “metastases”), as well as mass-forming neoplasms (tumors) and lymphoid neoplasms (such as lymphomas and leukemias), and also MRD.

[0019] The term “minimal residual disease” (MRD) refers to the evidence for the presence of small numbers of residual cancer cells that remain in the patient after cancer treatment, e.g. when the patient is in remission (the patient has no symptoms or signs of disease). A very small number of remaining cancer cells usually cannot be detected by routine means because the standard tests used to assess or detect cancer are not sensitive enough to detect MRD. Nowadays, very sensitive molecular biology tests for MRD are available, such as flow cytometry, PCR and next-generation sequencing. These tests can measure minimal levels of cancer cells in tissue samples, sometimes as low as one cancer cell in a million normal cells. In the context of the present invention, the terms “prevention”, “treatment” or “amelioration” of a neoplasm are envisaged to also encompass “prevention, treatment or amelioration of MRD”, whether the MRD was detected or not.

[0020] Is it envisaged that the BCMA positive neoplasm is a B cell neoplasm or a plasma cell neoplasm. B cells, also known as B lymphocytes, are a type of white blood cell of the lymphocyte subtype. They function in the humoral immunity component of the adaptive immune system by secreting antibodies. Additionally, B cells present antigen (they are also classified as professional antigen-presenting cells) and secrete cytokines. In mammals, B cells mature in the bone marrow, which is at the core of most bones. B cells, unlike the other two classes of lymphocytes—T cells and natural killer (NK) cells—express B cell receptors (BCRs) on their cell membrane. BCRs allow the B cell to bind to a specific antigen, against which it will initiate an antibody response. Plasma cells, also called plasma B cells, plasmocytes, or effector B cells, are white blood cells that secrete large volumes of antibodies. They are usually transported by the blood plasma and the lymphatic system. Plasma cells originate in the bone marrow. B cells differentiate into plasma cells that produce antibody molecules closely modelled after the receptors of the precursor B cell. Once released into the blood and lymph, these antibody molecules bind to the target antigen and initiate its neutralization or destruction.

[0021] The level of expression of BCMA on the cell surface can be determined e.g. by flow cytometry analysis. The subpopulation of cells (e.g. B cells, plasma cells, MM cells, CD138+ cells) that is selected for analysis of BCMA expression can e.g. be stained with an anti-BCMA antibody, followed by a secondary antibody, and then analyzed in a FACS assay. A BCMA negative cell line (such as K562, A549, TC71, CCRF-CEM) can be used as control. A shift in the FACS assay (with the BCMA negative cell line defining 0% BCMA expression) indicates that the cells to be analyzed are BCMA positive. Different levels of BCMA expression can exist on the surface cells, such as low, medium or high expression. See also Quinn et al., Blood (2011) 117:890-901 and Sanchez et al, Br J Heamatol 2012 Jul. 18.

[0022] The “BCMA positive neoplasm” or the “(BCMA positive) B cell neoplasm or plasma cell neoplasm” can be selected from the group including, but not limited to, multiple myeloma, relapsed and/or refractory multiple myeloma, heavy chain multiple myeloma, light chain multiple myeloma, extramedullary myeloma (extramedullary plasmacytoma, extramedullary multiple myeloma), plasmacytoma, plasma cell leukemia, Waldenström's macroglobulinemia (lymphoplasmacytic lymphoma), and smoldering myeloma (smoldering multiple myeloma). The present disclosure hence also relates to an antibody construct for use in the treatment or amelioration of multiple myeloma (MM), plasmacytoma, plasma cell leukemia and Waldenström's macroglobulinemia, as described herein. The MM can be selected from the group consisting of or comprising relapsed and/or refractory multiple myeloma, heavy chain multiple myeloma, light chain multiple myeloma, extramedullary multiple myeloma, and smoldering multiple myeloma.

[0023] The antibody construct of the invention (and the pharmaceutical composition comprising such antibody construct) is/are useful in the treatment, amelioration and/or prevention of the BCMA positive neoplasm as described herein in a subject in need thereof. The term “treatment” refers to both therapeutic treatment and prophylactic or preventative measures. Treatment includes the administration of the antibody construct (or the pharmaceutical composition comprising such antibody construct) to the patient's body, to an isolated tissue, or to a cell from a patient or a subject in need who has a BCMA positive neoplasm as described herein, a symptom of such neoplasm, or a predisposition toward such neoplasm, with the purpose to cure, heal, alleviate, relieve, alter, remedy, ameliorate, improve, or affect the BCMA positive neoplasm, one or more symptoms of the BCMA positive neoplasm, or the predisposition toward the disease.

[0024] The terms “subject in need”, “patient” or those “in need of treatment” include those already with the BCMA positive neoplasm, as well as those in an MRD setting and those in which the neoplasm is to be prevented. The terms also include human and other mammalian subjects that receive either prophylactic or therapeutic treatment.

[0025] The term “amelioration” as used herein refers to any improvement of the disease state (the disease being a BCMA positive neoplasm) of a patient, by the administration of an antibody construct according to the invention to such patient or subject in need thereof. Such an improvement may be seen as a slowing down the progression or stopping the progression of the disease of the patient, and/or as a decrease in severity of disease symptoms, an increase in frequency or duration of disease symptom-free periods or a prevention of impairment or disability due to the disease.

[0026] The term “prevention” as used herein means the avoidance of the occurrence or of the re-occurrence of a disease as specified herein, by the administration of an antibody construct according to the invention to a subject in need thereof.

[0027] In the case of Multiple Myeloma, the symptoms and signs vary greatly because many organs can be affected by the disease. The common symptoms of multiple myeloma include elevated calcium levels, renal failure, anemia, and bone lesions (together, “CRAB” features). In advanced MM, bone pain, bleeding, and frequent infections may occur. Complications may also include amyloidosis. The International Myeloma Working Group (IMWG) has established criteria for the diagnosis of MM which teach, in addition to the classic CRAB features, three “myeloma defining events” (MDEs):
[0028] 60% or greater clonal plasma cells on bone marrow examination
[0029] Serum involved/uninvolved free light chain ratio of 100 or greater, provided the absolute level of the involved light chain is at least 100 mg/L (a patient's “involved” free light chain—either kappa or lambda—is the one that is above the normal reference range; the “uninvolved” free light chain is the one that is typically in, or below, the normal range)
[0030] More than one focal lesion on MRI that is at least 5 mm or greater in size
   The presence of at least one of these markers is considered sufficient for a diagnosis of multiple myeloma, regardless of the presence or absence of symptoms or CRAB features. See also Palumbo A. J Clin Oncol. 2014 Feb. 20; 32(6): 587-600.

[0031] Bone pain affects almost 70% of patients and is the most common symptom. It usually involves the spine and ribs. Involvement of the vertebrae may lead to spinal cord compression or kyphosis. Myeloma bone disease is due to the overexpression of receptor activator for nuclear factor κB ligand (RANKL) by bone marrow stroma. RANKL activates osteoclasts, which resorb bone. The resultant bone lesions are lytic (i.e. they cause breakdown) in nature, and are best seen in plain radiographs. The breakdown of bone also leads to the release of calcium into the blood, leading to hypercalcemia and its associated symptoms.

[0032] The anemia found in myeloma is usually normocytic and normochromic. It results from the replacement of normal bone marrow by infiltrating tumor cells and inhibition of normal red blood cell production (hematopoiesis) by cytokines.

[0033] A bone marrow biopsy can be performed to estimate the percentage of bone marrow occupied by plasma cells. This percentage is used in the diagnostic criteria for MM. Usually, MM patients have ≥10% clonal bone marrow plasma cells. Immunohistochemistry (staining particular cell types using antibodies against surface proteins) can detect plasma cells which express immunoglobulin in the cytoplasm and occasionally on the cell surface; for example, myeloma cells are typically positive for the markers CD56, CD38, CD138, CD319, but other markers may be included as well to define or identify MM.

[0034] The so-called “paraprotein” (also called myeloma protein, monoclonal protein or M protein,) is an abnormal immunoglobulin fragment that is produced in excess by an abnormal monoclonal proliferation of plasma cells, typically in MM. In theory, MM patients can produce all classes of immunoglobulin, but IgG paraproteins are most common, followed by IgA and IgM, while IgD and IgE myeloma are very rare. In addition, antibody light chains and/or heavy chains may be secreted in isolation: kappa or lambda light chains or any of the five types of heavy chains (alpha, gamma, delta, epsilon or my (μ)-heavy chains). This proliferation of the paraprotein has several deleterious effects on the body, including impaired immune function, abnormally high blood viscosity, and kidney damage. Patients without evidence of paraprotein may have “nonsecretory” myeloma (not producing immunoglobulins); they represent approximately 3% of all MM patients. The presence of serum and/or urinary paraprotein is an indicator for MM, except in patients with true nonsecretory MM. Quantitative measurements of the paraprotein in urine and/or serum of a patient can be used to establish a diagnosis and/or to monitor the disease.

[0035] Kidney failure may develop both acutely and chronically. The most common cause of kidney failure in MM is due to proteins secreted by the malignant cells. Myeloma cells produce monoclonal proteins of varying types, most commonly immunoglobulins (antibodies) and free light chains, resulting in abnormally high levels of these proteins (paraproteins) in the blood. Depending on the size of these proteins, they may be excreted through the kidneys, but kidneys can also be damaged by their effects. Furthermore, increased bone resorption leads to hypercalcemia and causes nephrocalcinosis, thereby contributing to the kidney failure.

[0036] The most common infections occurring in MM are pneumonias and pyelonephritis. The increased risk of infection is due to immune deficiency. Although the total immunoglobulin level is typically elevated in MM, the majority of the antibodies are ineffective monoclonal antibodies from the clonal plasma cell.

[0037] It is envisaged that the administration of the antibody construct in the treatment or amelioration of a BCMA positive neoplasm according to the invention
[0038] reduces the level of paraprotein or free light chain in the urine and/or serum by at least about 20%, at least about 30%, at least about 40%, at least about 50%, at least about 60%, at least about 70%, at least about 80%, or at least about 90% relative to the paraprotein or free light chain level in the urine and/or serum, respectively, prior to the start of the treatment, i.e. prior to the first administration of the antibody construct (“prior to”, in this specific context, means within 1, 2, 4, 6, 8, or 12 hours before, within 1, 2, 3, 4, 5 or 6 days before, within 1, 2, 3 or 4 weeks before, or within 1, 2, 3 or 4 months before);
[0039] reduces the percentage of plasma cells in the bone marrow by at least about 20%, at least about 30%, at least about 40%, at least about 50%, at least about 60%, at least about 70%, at least about 80%, or at least about 90% relative to the percentage of plasma cells in the bone marrow prior to the start of the treatment, i.e. prior to the first administration of the antibody construct (“prior to”, in this specific context, means within 1, 2, 4, 6, 8, or 12 hours before, within 1, 2, 3, 4, 5 or 6 days before, within 1, 2, 3 or 4 weeks before, or within 1, 2, 3 or 4 months before);
[0040] induces a reduction of any of the symptoms described above by at least about 20%, at least about 30%, at least about 40%, at least about 50%, at least about 60%, at least about 70%, at least about 80%, or at least about 90% relative to the symptoms prior to the start of the treatment, i.e. to the first administration of the antibody construct (“prior to”, in this specific context, means within 1, 2, 4, 6, 8, or 12 hours before, within 1, 2, 3, 4, 5 or 6 days before, within 1, 2, 3 or 4 weeks before, or within 1, 2, 3 or 4 months before, depending on the symptom);
[0041] inhibits tumor growth or tumor cell proliferation by at least about 20%, at least about 30%, at least about 40%, at least about 50%, at least about 60%, at least about 70%, at least about 80%, or at least about 90% relative to untreated patients or relative to untreated cells; and/or
[0042] induces lysis of the cells of the BCMA positive neoplasm of at least about 20%, at least about 30%, at least about 40%, at least about 50%, at least about 60%, at least about 70%, at least about 80%, or at least about 90% relative to untreated patients or relative to untreated cells.

[0043] The ability of an antibody construct of the invention to inhibit tumor growth/tumor cell proliferation or to induce cell lysis may be evaluated in an animal model predictive of efficacy in human tumors, or in an in vitro or ex vivo study (such as depletion of BCMA positive cells by autologous T cells from a multiple myeloma patient's BM aspirate induced by the antibody construct). Efficacy assessments of the antibody construct may furthermore be performed as follows: Tumor assessment can be done by analysis of percent myeloma involvement, by FISH (fluorescent in situ hybridization) as well as by karyotyping in the bone marrow (BM). Data for BM karyotyping and FISH may be obtained from a BM sample. Serum protein electrophoresis (SPEP) and urine protein electrophoresis (UPEP) allow for measurement of serum/urine M protein. Immunofixation is another means to detect serum and/or urine M protein. It is also envisaged that serum free light chain assay and ratio analysis can be performed. In case of free light chain (FLC) multiple myeloma, FLC can be analyzed in serum and urine (sFLC and uFLC). Levels of involved/uninvolved FLC, ratio of monoclonal lambda-FLC/kappa-FLC, and ratio of monoclonal kappa-FLC/lambda-FLC can be determined. Furthermore, quantitative and qualitative immunoglobulin (Ig) can also be analyzed, and beta-2 microglobulin in serum can be assessed. It is also envisaged that skeletal survey and plasmacytoma assessments can be performed. Screening imaging to evaluate for extramedullary relapse using whole-body MRI or PET/CT can be performed. Imaging appropriate for assessment of bone lesions includes, but is not limited to, CT scan, MRI, PET, PET-CT, or other standard-of-care method. It is also envisaged that minimal residual disease is measured by a next generation sequencing (NGS) based assay. For this purpose, bone marrow aspirates can be collected from subjects suspected to be complete responders. Plasma samples can additionally be collected from subjects at the same time points as BM MRD samples are collected, to assess the feasibility of MRD detection on ctDNA (circulating tumor DNA). MRD response may be defined as <1 tumor cell/10⁴ normal cells in the bone marrow per FACS using antibodies to cytIgλ, cytIgκ, CD19, CD56 or CD138, CD38, and CD45, as needed. In one embodiment of the invention, these markers are a sufficient condition to define a tumor cell in the context of the present invention.

[0044] It is envisaged that a patient's or subject's response to the administration of the antibody construct according to the invention is measured in one of the following ways:
[0045] quantitative measurement of the paraprotein (M protein) or free light chain in the urine and/or serum;
[0046] determination of the percentage of plasma cells in the bone marrow; and/or
[0047] imaging (CT, MRI) of extramedullary manifestations

[0048] The antibody construct of the invention is administered for at least one cycle, but more cycles of administration such as 2, 3, 4, 5, 6, 7, 8, 9 or 10 cycles are also envisaged. For example, an administration of 1-5 cycles is considered to be beneficial for a patient in need.

[0049] According to the invention, “one cycle” comprises a period of administration of the antibody construct of at least seven consecutive days (one week). It is furthermore envisaged that one cycle comprises a period of administration of the antibody construct, followed by a period without administration of the antibody construct (“treatment holiday”, “pause” or “break”). If a patient receives only one single cycle, this cycle ends with the last day of administration of the antibody construct. On the other hand, if a patient receives more than one cycle, each cycle comprises a period of administration followed by a period without administration. The period without administration of the antibody construct (“pause”) is defined by its length, see below. It is envisaged that if a patient receives more than one cycle (e.g. 2, 3, 4, 5, 6, 7, 8, 9 or 10 cycles), the last administration cycle does not comprise a period without administration of the antibody construct (i.e. the last cycle ends with the last day of administration).

[0050] The period of administration of the antibody construct is at least seven consecutive days (one week). It is envisaged that this period is up to eight weeks. Any duration between one week and eight weeks is also envisaged, such as two weeks, three weeks, four weeks, five weeks, six weeks, or seven weeks, or any other period between one week and eight weeks composed of a certain number of weeks and a certain number of days (such as, one, two, three, four, five, or six days). The period of administration can hence also be 7, 10, 14, 15, 20, 21, 25, 28, 30, 35, 40, 42, 45, 48 50, 55, or 56 consecutive days. The period of administration can e.g. be from 1 to 8 weeks, from 1 to 7 weeks, from 2 to 6 weeks, from 3 to 5 weeks, or from 25 to 30 days. For example, four weeks of administration (i.e. 28 consecutive days) within one cycle is considered to be beneficial for a patient in need. Independent of its specific duration, it is envisaged that the period of administration is characterized by a daily administration of the antibody construct.

[0051] According to one embodiment of the invention, the period without administration of the antibody construct is at least seven consecutive days (one week), and it may be up to three months. Any duration between one week and three months is also envisaged, such as two weeks, three weeks, four weeks, one month, five weeks, six weeks, seven weeks, eight weeks, two months, nine weeks, ten weeks, eleven weeks, twelve weeks or thirteen weeks, or any other period between one week and three months composed of a certain number of months and/or a certain number of weeks and/or a certain number of days (such as, one, two, three, four, five, or six days). The period without administration of the antibody construct can e.g. be from 1 week to 3 months, from 1 week to 2 months, from 1 week to 1 month, from 1 week to 4 weeks, from 1 week to 3 weeks, from 10 days to 20 days, or from 10 to 15 days. For example, two or three weeks without administration within one cycle is considered to be particularly beneficial for a patient in need. Starting after the fourth cycle, a longer period without administration of the antibody construct may be implemented, such as a period of three to five weeks, or four weeks.

[0052] According to one embodiment, the antibody construct is administered in one to five cycles, preferably four or five cycles, wherein one cycle comprises or consists of a period of administration of two to five weeks (i.e. 14 to 35 consecutive days), preferably four weeks (i.e. 28 consecutive days), followed by a period without administration of one to four weeks, preferably two or three weeks.

[0053] The different administration cycles that a patient can receive do not have to be fully identical in terms of the length of the period of administration of the antibody construct and the length of the period without its administration. As a consequence, the entire length of the different cycles is not necessarily identical either. For example, the length of the period of administration can vary between the different cycles; it can e.g. become longer or shorter with every cycle or from one cycle to the next. Alternatively or additionally, the length of the period without administration can vary between the different cycles; it can e.g. become longer or shorter with every cycle or from one cycle to the next. The same applies to the dose of the antibody construct, as discussed herein below.

[0054] According to the invention, the antibody construct is administered at a dose of 6.5 μg/day up to 650 μg/day in at least one cycle, wherein one cycle comprises a period of administration of at least seven consecutive days (one week). This means that the antibody construct is administered for at least 7 consecutive days at a dose between and including 6.5 μg/day and 650 μg/day. The dose of the antibody construct may be 6.5, 10, 20, 30, 40, 50, 60, 70, 80, 90, 100, 125, 150, 200, 250, 300, 350, 400, 450, 500, 550, 600 or 650 μg/day. According to one embodiment, the dose is about 400 μg/day. A preferred dose or dose range of the antibody construct of the invention may also be 6.5 to 650 μg/day, 10 to 600 μg/day, 20 to 600 μg/day, 30 to 600 μg/day, 40 to 600 μg/day, 50 to 600 μg/day, 60 to 600 μg/day, 70 to 600 μg/day, 80 to 600 μg/day, 90 to 600 μg/day, 100 to 600 μg/day, 150 to 650 μg/day, 200 to 600 μg/day, 300 to 600 μg/day, 250 to 550 μg/day, 300 to 550 μg/day, 300 to 500 μg/day, 350 to 450 μg/day, 350 to 650 μg/day, or 400 to 600 μg/day. It is envisaged that these doses may apply for an antibody construct having a molecular weight of about 20 to about 90 kDa, about 30 to about 80 kDa, about 40 to about 70 kDa, about 50 to about 60 kDa, about 52 to about 58 kDa, and preferably about 54 to about 56 kDa. In case the antibody construct has a different (lower or higher) molecular weight, respective equimolar doses can easily be determined. For example, assuming that one preferred antibody construct according to the invention has a molecular weight of 55 kDa, then 650 μg of this antibody construct correspond to 1.18×10⁻⁸ mol. Likewise, 6.5 μg of this antibody construct correspond to 1.18×10⁻¹⁰ mol.

[0055] It is envisaged that the antibody construct of the invention has a molecular weight of about 20 to about 90 kDa, about 30 to about 80 kDa, about 40 to about 70 kDa, about 50 to about 60 kDa, about 52 to about 58 kDa, and preferably about 54 to about 56 kDa. It is furthermore envisaged that the antibody construct of the invention has a terminal elimination half-life or an elimination half-life (T_{1/2}) of about 3-36 h, about 6-30 h, or about 12-24 h. “Half-life” is the time required for a quantity to reduce to half its initial value. The medical sciences refer to the half-life of substances or drugs in the human body. In a medical context, half-life may refer to the time it takes for a substance/drug to lose one-half of its activity, e.g. pharmacologic, physiologic, or radiological activity. The half-life may also describe the time that it takes for the concentration of a drug or substance in blood plasma to reach one-half of its steady-state value (“elimination half-life”). Typically, the elimination or removal of an administered substance/drug refers to the body's cleansing through biological processes such as metabolism, excretion, also involving the function of kidneys and liver. The “first-pass metabolism” is a phenomenon of drug metabolism whereby the concentration of a drug is reduced before it reaches the circulation. It is the fraction of drug lost during the process of absorption. Accordingly, by “hepatic first-pass metabolism” is meant the propensity of a drug to be metabolized upon first contact with the liver, i.e. during its first pass through the liver.

[0056] It is envisaged that the antibody construct is administered at a dose of 6.5 μg/day up to 650 μg/day in at least one cycle, wherein one cycle comprises a period of administration of at least seven consecutive days (one week), and wherein the dose is constant during each cycle. A “constant” dose means that during the period of administration within one cycle, the same dose is administered to the patient every day. It is furthermore envisaged that the antibody construct is administered at a dose of 6.5 μg/day up to 650 μg/day in more than one cycle (e.g. from 1 up to 10 cycles), wherein one cycle comprises a period of administration of at least seven consecutive days (one week), and wherein the dose is constant during each cycle and from one cycle to the subsequent cycle. This could mean e.g. that the antibody construct is administered at the same dose in cycles 1 and 2, in cycles 2 and 3, in cycles 3 and 4, in cycles 4 and 5, in cycles 1 to 3, in cycles 2 to 4, in cycles 3 to 5, in cycles 1 to 4, in cycles 2 to 5, or in cycles 1 to 5, etc. It is furthermore envisaged that the antibody construct is administered at a dose of 6.5 μg/day up to 650 μg/day in more than one cycle (e.g. from 1 up to 10 cycles), wherein one cycle comprises a period of administration of at least seven consecutive days (one week), and wherein the dose is constant during each cycle, but differs between the cycles. For example, the dose of the antibody construct can increase from one cycle to the subsequent cycle, or can decrease from one cycle to the subsequent cycle. The antibody construct might e.g. be administered at a dose of 400 μg/day during one or more cycles (such as the first cycle or the first and second cycle), and at a dose of 500 μg/day or 600 μg/day during one or more subsequent cycles (such as the second, third, fourth or fifth cycle). It is also envisaged that the antibody construct is administered at a dose of 6.5 μg/day up to 650 μg/day in at least one cycle, wherein one cycle comprises a period of administration of at least seven consecutive days (one week), and wherein the dose increases during at least one cycle. The dose increase may be during the first cycle or during the first and the second cycle, but may also be during more than the first two cycles. The lower dose may be administered during a period of 1-7 days, 1-5 days, 2-4 days or 3 days, followed by a higher dose administered until the end of the cycle. As an example, the lower dose may be 100-300 μg/day or 200 μg/day, followed by a higher dose of 350-450 μg/day or 400 μg/day; or the lower dose may e.g. be 300-500 μg/day or 400 μg/day, followed by a higher dose of 550-650 μg/day or 600 μg/day; or the lower dose may be 200 μg/day, for example during a period of 3 days, for example during the first cycle, followed by a higher dose of 400 or 600 or 650 μg/day administered until the end of the first cycle. In the latter case, it is envisaged that from the second cycle onwards, the respective higher dose is administered. It is envisaged that the higher dose does not exceed 650 μg/day.

[0057] The antibody construct of the invention will generally be designed for specific routes and methods of administration. A route of administration in pharmacology is the path by which a substance is taken into the body. Routes of administration are generally classified by the location at which the substance is applied, these can be topical (local), enteral (system-wide effect of the substance, but delivered through the gastrointestinal tract), or parenteral (systemic action of the substance, but delivered by routes other than the gastrointestinal tract). In the context of the present invention, the routes of administration include topical, enteral and parenteral routes. The reason for the choice of routes of drug administration are governed by various factors such as:
[0058] Physical and chemical properties of the drug. The physical properties are solid, liquid and gas. The chemical properties are solubility, stability, pH, irritancy etc.
[0059] Site of desired action: The action may be localized and approachable or generalized and not approachable.
[0060] Rate of extent of absorption of the drug from different routes.
[0061] Condition of the patient.

[0062] The antibody construct of this invention (and a pharmaceutical composition comprising this antibody construct) is particularly useful for parenteral administration. Parenteral administration generally acts more rapidly than topical or enteral administration, and often comes along with a very high bioavailability of up to 100% (in particular, in the case of IV administration). In general, parenteral administration includes, but is not limited to, intravenous, intracerebral, intraarterial, intraperitoneal, intraosseous, and intravesical delivery.

[0063] The administration according to the present invention is preferably intravenous. Parenteral or intravenous administration can be performed by injection (e.g. using a needle and a syringe) or by infusion (e.g. via a catheter and a pump system). It is hence envisaged that the administration according to the present invention is via intravenous injection or via intravenous infusion. Usually, an IV infusion is administered via a line, a port or a catheter (small, flexible tube), such as a central venous access or a central venous catheter (CVC) which is a catheter placed into a large vein, or a peripheral venous catheter (PVC), which is a catheter placed into a peripheral vein. In general, catheters or lines can be placed in veins in the neck (internal jugular vein), chest (subclavian vein or axillary vein), groin (femoral vein), or through veins in the arms (also known as a PICC line, or peripherally inserted central catheters). Central IV lines have their catheters that are advanced through a vein and empty into a large central vein, usually the superior vena cava, inferior vena cava or even the right atrium of the heart. A peripheral intravenous (PIV) line is used on peripheral veins (the veins in the arms, hands, legs and feet). A port is a central venous line that does not have an external connector; instead, it has a small reservoir that is covered with silicone rubber and is implanted under the skin. Medication is administered intermittently by placing a small needle through the skin, piercing the silicone, into the reservoir. When the needle is withdrawn, the reservoir cover reseals itself. The cover can accept hundreds of needle sticks during its lifetime.

[0064] The present invention provides for a bolus administration of the antibody construct of the invention. A bolus is the administration of a discrete amount of a medication, drug, or other compound within a specific negligible time, generally within 1-30 minutes. In most cases, the bolus administration is given intravenously. A bolus is usually administered via injection (e.g. an intravenous bolus injection), but a bolus infusion (e.g. an intravenous bolus infusion) is also possible. A short infusion is an infusion (usually an IV infusion), of a small volume (such as 20 mL to 100 mL), which is administered over a period of, at most, three hours, usually of 30 to 60 minutes.

[0065] Intravenous “intermittent infusion” is an infusion of a volume of medication over a set period of time, such as 20-120 minutes or 30-60 minutes, at prescribed intervals, such as every 4, 6, 8, 10, 12, 14, 16, 18, 20, 22 or 24 hours. The purpose is to administer small amounts of medication at regular intervals. An intermittent medication—like any other form of infusion—may be administered by gravity or via an electronic infusion device (EID), also known as an infusion pump.

[0066] In the case of an infusion, an infusion pump may be used to infuse the medication (antibody construct) into a patient's circulatory system. The pump is generally used intravenously, although arterial and epidural infusions with pumps are also possible. The solution for infusion may be prepared in bags for IV infusion and delivered through infusion lines. Infusion pumps can administer fluids in ways that would be unreliable if performed manually. For example, they can administer as little as 0.1 mL per hour injections, injections every minute, injections with repeated boluses, up to a maximum number per hour, or fluids whose volumes vary by the time of day. It is also possible that infusions are administered using only the pressure supplied by gravity. Different types of infusions according to the present invention include, but are not limited to, continuous infusion, bolus infusion, short infusion, and intermittent infusion. A continuous intravenous (cIV) administration or infusion is one preferred embodiment of the administration of the antibody construct according to the invention. It is for example envisaged that the antibody construct is administered as a cIV infusion at a constant flow rate.

[0067] The present invention provides for a continuous administration, i.e. an uninterrupted or substantially uninterrupted administration of the antibody construct/composition comprising the antibody construct of the invention. As a non-limiting example, this may be realized by a small pump system worn by the patient for metering the influx of the therapeutic agent into the body of the patient. The antibody construct of the invention (or a pharmaceutical composition comprising the antibody construct) can be administered using said pump systems. Such pump systems are generally known in the art, and commonly rely on periodic exchange of cartridges containing the therapeutic agent to be infused. When exchanging the cartridge in such a pump system, a temporary interruption of the otherwise uninterrupted flow of the therapeutic agent into the body of the patient may ensue. In such a case, the phase of administration prior to cartridge replacement and the phase of administration following cartridge replacement would still be considered within the meaning of the pharmaceutical means and methods of the invention and would together make up one “uninterrupted administration” of such therapeutic agent. The same applies for bag changes, i.e. in cases the continuous administration is realized by means of a bag (instead of a small cartridges) containing the antibody construct solution, or any other recipient or reservoir comprising the antibody construct of the invention for continuous administration. It is envisaged that the antibody construct of the invention is provided in infusion bags. These bags are changed in accordance with country regulations and local pharmacy standards for infusion of compounded sterile products, usually up to 48 hours in the US and up to 96 hours in Australia and Europe.

[0068] A continuous or uninterrupted administration of the antibody construct of the invention may be carried out by way of a fluid delivery device or small pump system including a fluid driving mechanism for driving fluid out of a reservoir and an actuating mechanism for actuating the driving mechanism. Pump systems for such administration may include a needle or a cannula for penetrating the skin of a patient and delivering the suitable composition into the patient's body. The pump system can be attached to the skin of the patient for 24 hours up to several days. The pump system may be of small size with a reservoir for small volumes. As a non-limiting example, the volume of the reservoir for the suitable pharmaceutical composition to be administered can be between 0.1 and 50 ml.

[0069] The (daily) dose of the antibody construct may e.g. be administered as a bolus administration (bolus injection or bolus infusion), an injection, a continuous administration, a continuous infusion, or as a short infusion. A continuous administration is preferred, and a continuous IV (cIV) administration/continuous IV infusion is most preferred.

[0070] Pharmaceutical compositions may be administered using a medical device. Examples of medical devices for administering pharmaceutical compositions are described in U.S. Pat. Nos. 4,475,196; 4,439,196; 4,447,224; 4,447, 233; 4,486,194; 4,487,603; 4,596,556; 4,790,824; 4,941,880; 5,064,413; 5,312,335; 5,312,335; 5,383,851; and 5,399,163.

[0071] In the context of the present invention, it is envisaged that a premedication is administered prior to the start of administration of the antibody construct in the first cycle, and optionally also prior to the start of administration of the antibody construct in one or more of the following cycles, such as the second, third, fourth and/or fifth cycle. It is envisaged that “prior to”, in this specific context, means within 24 hours, 18 hours, twelve hours, six hours, five hours, four hours, or three hours, and preferably within 120, 90, 60 or 30 minutes before the start of administration of the antibody construct. The premedication may e.g. be administered 30-120 or 30-60 minutes prior to start of administration of the antibody construct. It is also envisaged that a comedication is administered concurrent with or after the start of administration of the antibody construct in the first cycle, and optionally also concurrent with or after the start of administration of the antibody construct in one or more of the following cycles, such as the second, third, fourth and/or fifth cycle. It is envisaged that “after”, in this specific context, means within 24 hours, 18 hours, twelve hours, six hours, five hours, four hours, or three hours, and preferably within 120, 90, 60, 30, 20, 15 or 10 minutes after the start of administration of the antibody construct. The comedication may e.g. be administered 10-120, 10-60, 10-30 or 15-20 minutes after start of administration of the antibody construct. The purpose of the premedication or comedication may be e.g. to prevent or reduce severity of infusion-related reactions. Premedication is preferred over comedication.

[0072] The premedication or comedication may include any one or a combination of the following:
[0073] Paracetamol (acetaminophen, APAP) or an equivalent; to be preferably administered orally (p.o.) or intravenously; and to be preferably administered at a dose of 100-4000 mg, preferably 200-3000 mg or 300-2500 mg or 400-2000 mg or 500-1500 mg, preferably 600-1400 mg, 700-1300 mg, 800-1200 mg, 900-1100 mg or about 1000 mg p.o. paracetamol (or an equivalent dose for an equivalent medication and/or another route of administration). The skilled person knows how to identify paracetamol equivalents. They include, but are not limited to, ibuprofen (to be administered e.g. at a dose of 100-3200 mg, preferably 200-3000 mg or 300-2500 mg or 400-2000 mg, preferably 500-1500 mg, 600-1200 mg, 700-1000 mg, 750-900 mg or about 800 mg) and metamizole (to be administered e.g. at a dose of 100-4000 mg, preferably 200-3000 mg or 300-2500 mg or 400-2000 mg, or about 500-1000 mg)
[0074] One or more analgesics selected from meperidine, dipyrone, hydromorphone, fentanyl, and tramadol
[0075] Antihistamine, to be preferably administered orally or intravenously, and to be preferably administered at a dose equivalent to diphenhydramine 50 mg i.v. The skilled person knows how to identify antihistamines. They include, but are not limited to, antihistamines of oral, parenteral or rectal route such as: azatadine (maximum dose e.g. 4 mg/day), brompheniramine (maximum dose e.g. 30 mg/day), cetirizine (maximum dose e.g. 15 mg/day), chlorpheniramine (maximum dose e.g. 30 mg/day), clemastine (maximum dose e.g. 10 mg/day), cyproheptadine (maximum dose e.g. 15 mg/day), desloratadine (maximum dose e.g. 7 mg/day), dexchlorpheniramine (maximum dose e.g. 15 mg/day), diphenhydramine (maximum dose e.g. 350/per day), doxylamine (maximum dose e.g. 180 mg/day), fexofenadine (maximum dose e.g. 200 mg/day), loratadine (maximum dose e.g. 15 mg/day), phenindamine (maximum dose e.g. 180 mg/day)
[0076] Glucocorticoid, to be preferably administered orally or intravenously, and to be preferably administered at a dose equivalent to 4-20 mg or 6-18 mg or 8-16 mg or 16 mg dexamethasone i.v. (the equivalence referring to the glucocorticoid potency)

[0077] All four substances or substance groups listed above may be administered as premedication or comedication, or a combination of only two or of three substances, or only one of the four substances. It is envisaged that the glucocorticoid (GC) dose administered before the start of the second cycle may be identical to the GC dose administered before start of the first cycle, or may be reduced to about 50% of the dose administered before start of the first cycle, or may be omitted for the second (and potentially any subsequent) cycle. A reduction of the GC dosage may apply e.g. if the antibody construct according to the invention is well tolerated without significant signs of infusion-related reactions during the first cycle. It is furthermore envisaged that the dose may further be reduced before start of the third and any subsequent cycle. Alternatively, while GC is administered as premedication (and potentially comedication) before the start of the first cycle, no GC premedication or comedication is administered in the second, third, fourth and/or fifth cycle. In general, the dose of the premedication or comedication that is to be used in accordance with the embodiments of the present invention will depend on the circumstances of the individual patient.

[0078] Glucocortocoids are a class of corticosteroids, which are a class of steroid hormones. Glucocorticoids are corticosteroids that bind to the glucocorticoid receptor. A less common synonym is glucocorticosteroid.

[0079] Cortisol (known as hydrocortisone when used as a medication) is the most important human glucocorticoid. A variety of synthetic glucocorticoids, some far more potent than cortisol, have been created for therapeutic use. They differ in both pharmacokinetics (e.g. absorption factor, half-life, volume of distribution, clearance) and pharmacodynamics (e.g. glucocorticoid potency or mineralocorticoid potency). Cortisol is the standard of comparison for glucocorticoid potency. One example for commonly prescribed replacement steroid equivalents may be prednisone (5 mg)=cortisone (25 mg)=dexamethasone (0.75 mg)=hydrocortisone (20 mg)=methylprednisolone (4 mg). These doses indicate the equivalent pharmacologic dose of systemic glucocorticoids. Another corticosteroid comparison chart indicating the half-lives of the different substances can be found e.g. in www.nadf.us/downloads/adrenalhormone.pdf.

[0080] Examples of GCs to be used as premedication or comedication in the present embodiment include, but are not limited to, cortisone, hydrocortisone, prednisone, prednisolone, methylprednisolone, dexamethasone, betamethasone, beclomethasone, budesonide, triamcinolone, cloprednol, deflazacort, fluocortolone, cortivazol, paramethasone, fluticasone, fluticasone propionate, triamcinolone acetonide, as well as combinations and/or pharmaceutically acceptable derivatives thereof. In the context of the present invention, the different GCs may be used alone or in combination. Dexamethasone, prednisone and prednisolone are preferred embodiments of GCs.

[0081] It is envisaged that all substances which already are or will be classified as a “glucocorticoid” may be employed in the context of the present invention as well. Such future glucocorticoids include compounds which specifically bind to and activate the glucocorticoid receptor. The term “specifically binds to the GC receptor” means in accordance with the present invention that the GC (or a compound which is assumed to act like a GC) associates with (e.g., interacts with) the GC receptor (also known as NR3C1) to a statistically significant degree as compared to association with proteins/receptors generally (i.e., non-specific binding). When the GC receptor binds to glucocorticoids, its primary mechanism of action is the regulation of gene transcription. In the absence of GC, the glucocorticoid receptor (GR) resides in the cytosol complexed with a variety of proteins including heat shock protein 90 (hsp90), heat shock protein 70 (hsp70) and the protein FKBP52 (FK506-binding protein 52). Binding of the GC to the glucocorticoid receptor results in release of the heat shock proteins. It is thus envisaged that a future GC, or a pharmaceutically acceptable derivative or salt of a GC, is able to bind to the GC receptor and to release the above mentioned heat shock proteins. The activated GR complex then up-regulates the expression of anti-inflammatory proteins in the nucleus or represses the expression of pro-inflammatory proteins in the cytosol by preventing the translocation of other transcription factors from the cytosol into the nucleus.

[0082] The antibody construct of the present invention comprises a first domain which binds to BCMA and a second domain which binds to CD3.

[0083] The term “antibody construct” refers to a molecule in which the structure and/or function is/are based on the structure and/or function of an antibody, e.g., of a full-length immunoglobulin molecule. An antibody construct hence immunospecifically binds to its target or antigen, and/or it comprises domains which are derived from or which are the heavy chain variable region (VH) and/or the light chain variable region (VL) of an antibody. Furthermore, an antibody construct according to the invention comprises the minimum structural requirements of an antibody which allow for immunospecific target binding. This minimum requirement may e.g. be defined by the presence of at least three light chain CDRs (i.e. CDR1, CDR2 and CDR3 of the VL region) and/or three heavy chain CDRs (i.e. CDR1, CDR2 and CDR3 of the VH region), preferably of all six CDRs.

[0084] Within the definition of “antibody” according to the invention are full-length antibodies, also including camelid antibodies and other immunoglobulins generated by biotechnological or protein engineering methods or processes. These full-length antibodies may be for example monoclonal, recombinant, chimeric, deimmunized, humanized and human antibodies, as well as antibodies from other species such as mouse, hamster, rabbit, rat, goat, or non-human primates.

[0085] “Antibody constructs” of the present invention may have the general structure of a full-length immunoglobulin as it occurs naturally. For example, they may comprise (at least) two full-length antibody heavy chains and two full-length antibody light chains. However, given that the antibody constructs according to the invention comprise one domain binding to BCMA and another domain binding to CD3, they do not occur naturally, and they are markedly different in their function from naturally occurring products. An antibody construct of the invention is hence an artificial “hybrid” molecule comprising at least two distinct binding domains with different specificities.

[0086] “Antibody constructs” of the present invention may also comprise fragments of full-length antibodies, such as VH, VHH, VL, (s)dAb, Fv, light chain (VL-CL), Fd (VH-CH1), heavy chain, Fab, Fab′, F(ab′)₂ or “r IgG” (“half antibody” consisting of a heavy chain and a light chain). Antibody constructs according to the invention may also comprise modified fragments of antibodies, also called antibody variants or antibody derivatives. Examples include, but are not limited to, scFv, di-scFv or bi(s)-scFv, scFv-Fc, scFv-zipper, scFab, Fab₂, Fab₃, diabodies, single chain diabodies, tandem diabodies (Tandab's), tandem di-scFv, tandem tri-scFv, “minibodies” exemplified by a structure which is as follows: (VH-VL-CH3)₂, (scFv-CH3)₂, ((scFv)₂-CH3+CH3), ((scFv)₂-CH3) or (scFv-CH3-scFv)₂, multibodies such as triabodies or tetrabodies, and single domain antibodies such as nanobodies or single variable domain antibodies comprising merely one variable region, which might be VHH, VH or VL, that specifically binds to an antigen or target independently of other variable regions or domains. Further possible formats of the antibody constructs according to the invention are cross bodies, maxi bodies, hetero Fc constructs, mono Fc constructs and scFc constructs.

[0087] Furthermore, the definition of the term “antibody construct” includes bivalent and polyvalent/multivalent constructs, which specifically bind to two, three or more antigenic structures, through distinct binding domains. An antibody construct can hence have more binding valences than specificities, e.g. in a case where it has two binding domains for the first target (BCMA) and one binding domain for the second target (CD3)—or vice versa—in which case the construct is trivalent and bispecific. Moreover, the definition of the term “antibody construct” includes molecules consisting of only one polypeptide chain as well as molecules consisting of two, three, four or more polypeptide chains, which chains can be either identical (homodimers, homotrimers or homo oligomers) or different (heterodimer, heterotrimer or heterooligomer). Examples for the above identified antibodies and their fragments, variants, derivatives and antibody constructs derived therefrom are described inter alia in Harlow and Lane, Antibodies: A laboratory manual, CSHL Press (1988); Kontermann and Dübel, Antibody Engineering, Springer, 2nd ed. 2010; and Little, Recombinant Antibodies for Immunotherapy, Cambridge University Press 2009. It is envisaged that the antibody construct is a single chain antibody construct/a single chain polypeptide.

[0088] The term “binding domain” or “domain which binds to . . . ” characterizes in connection with the present invention a domain of the antibody construct which immunospecifically binds to/interacts with/recognizes a given epitope on the target or antigen (here: BCMA in the case of the first domain, and CD3 in the case of the second domain). The structure and function of the first domain (binding to BCMA), and preferably also the structure and/or function of the second domain (binding to CD3), is/are based on the structure and/or function of an antibody, e.g. of a full-length immunoglobulin molecule. The “binding domain” or “domain which binds to . . . ” may hence comprise the minimum structural requirements of an antibody which allow for immunospecific target binding. This minimum structural requirement of the first domain may e.g. be defined by the presence of at least three light chain CDRs (i.e. CDR1, CDR2 and CDR3 of the VL region) and/or of three heavy chain CDRs (i.e. CDR1, CDR2 and CDR3 of the VH region), preferably of all six CDRs. It is envisaged that the second domain also comprises this minimum structural requirement of an antibody which allow for the immunospecific target binding. More preferably, the second domain also comprises at least three light chain CDRs (i.e. CDR1, CDR2 and CDR3 of the VL region) and/or three heavy chain CDRs (i.e. CDR1, CDR2 and CDR3 of the VH region), preferably all six CDRs. A “domain which binds to” (or a “binding domain”) may typically comprise an antibody light chain variable region (VL) and an antibody heavy chain variable region (VH); however, it does not have to comprise both, but may comprise only one of VH or VL. Fd fragments, for example, often retain some antigen-binding function of the intact antigen-binding domain.

[0089] Examples for the format of a “domain which binds to” (or a “binding domain”) include, but are not limited to, full-length antibodies, fragments of full-length antibodies (such as VH, VHH, VL), (s)dAb, Fv, light chain (VL-CL), Fd (VH-CH1), heavy chain, Fab, Fab′, F(ab′)₂ or “r IgG” (“half antibody”)), antibody variants or derivatives such as scFv, di-scFv or bi(s)-scFv, scFv-Fc, scFv-zipper, scFab, Fab₂, Fab₃, diabodies, single chain diabodies, tandem diabodies (Tandab's), tandem di-scFv, tandem tri-scFv, “minibodies” (selected from formats such as (VH-VL-CH3)₂, (scFv-CH3)₂, ((scFv)₂-CH3+CH3)), ((scFv)₂-CH3) or (scFv-CH3-scFv)₂, multibodies such as triabodies or tetrabodies, and single domain antibodies such as nanobodies or single variable domain antibodies comprising merely one variable region, which might be VHH, VH or VL. Further examples for the format of a “domain which binds to” (or a “binding domain”) include (1) an antibody fragment or variant comprising VL, VH, CL and CH1 (such as Fab); (2) an antibody fragment or variant comprising two linked Fab fragments (such as a F(ab′)₂); (3) an antibody fragment or variant comprising VH and CH₁ (such as Fd); (4) an antibody fragment or variant comprising VL and CL (such as the light chain); (5) an antibody fragment or variant comprising VL and VH (such as Fv); (5) a dAb fragment (Ward et al., (1989) Nature 341 :544-546), which has a VH domain; (6) an antibody variant comprising at least three isolated CDRs of the heavy and/or the light chain; and (7) a single chain Fv (scFv). Examples for embodiments of antibody constructs or binding domains according to the invention are e.g. described in WO 00/006605, WO 2005/040220, WO 2008/119567, WO 2010/037838, WO 2013/026837, WO 2013/026833, US 2014/0308285, US 2014/0302037, WO 2014/144722, WO 2014/151910, and WO 2015/048272.

[0090] It is envisaged that the antibody construct according to the invention may have a molecular weight of about 20 to about 90 kDa, about 30 to about 80 kDa, about 40 to about 70 kDa, about 50 to about 60 kDa, about 52 to about 58 kDa, and preferably about 54 to about 56 kDa.

[0091] The terms “(specifically or immunospecifically) binds to”, “(specifically or immunospecifically) recognizes”, or “(specifically or immunospecifically) reacts with” mean in accordance with this invention that an antibody construct or a binding domain interacts or (immuno-)specifically interacts with a given epitope on the target molecule (antigen), here: BCMA and CD3, respectively. This interaction or association occurs more frequently, more rapidly, with greater duration, with greater affinity, or with some combination of the aforementioned, to an epitope on the specific target than to alternative substances (non-target molecules). Because of the sequence similarity between homologous proteins in different species, an antibody construct or a binding domain that immunspecifically binds to its target (such as a human target) may, however, cross-react with homologous target molecules from different species (such as, from non-human primates, e.g. macaque). The term “specific/immunospecific binding” can hence include the binding of an antibody construct or binding domain to epitopes or structurally related epitopes in more than one species.

[0092] In the context of the present invention, the term “epitope” refers to the part or region of the antigen that is recognized/immunospecifically recognized by the binding domain. An “epitope” is antigenic, and thus the term epitope is sometimes also referred to as “antigenic structure” or “antigenic determinant”. The part of the binding domain that binds to the epitope is called a paratope. Specific binding is believed to be accomplished by specific motifs in the amino acid sequence of the binding domain and the antigen. Thus, binding is achieved as a result of their primary, secondary and/or tertiary structure as well as the result of potential secondary modifications of said structures. The specific interaction of the paratope with its antigenic determinant may result in a simple binding of said site to the antigen. In some cases, the specific interaction may alternatively or additionally result in the initiation of a signal, e.g. due to the induction of a change of the conformation of the antigen, an oligomerization of the antigen, etc.

[0093] The epitopes of protein antigens are divided into two categories, conformational epitopes and linear epitopes, based on their structure and interaction with the paratope. A conformational epitope is composed of discontinuous sections of the antigen's amino acid sequence. These epitopes interact with the paratope based on the three-dimensional surface features and shape or tertiary structure (folding) of the antigen. Methods of determining the conformation of epitopes include, but are not limited to, x-ray crystallography, two-dimensional nuclear magnetic resonance (2D-NMR) spectroscopy and site-directed spin labelling and electron paramagnetic resonance (EPR) spectroscopy. By contrast, linear epitopes interact with the paratope based on their primary structure. A linear epitope is formed by a continuous sequence of amino acids from the antigen and typically includes at least 3 or at least 4, and more usually, at least 5 or at least 6 or at least 7, for example, about 8 to about 10 amino acids in a unique sequence.

[0094] The interaction between the binding domain and the epitope of the target antigen implies that a binding domain exhibits appreciable or significant affinity for the epitope/the target antigen (here: BCMA and CD3, respectively). In general, it does furthermore not exhibit significant affinity for proteins or antigens other than the target antigen (here: BCMA/CD3)—notwithstanding the above discussed cross-reactivity with homologous targets e.g. from other species. “Significant affinity” includes binding with an affinity (dissociation constant, KD) of ≤10⁻⁶ M. Preferably, binding is considered specific when the binding affinity is ≤10⁻⁷ M, ≤10⁻⁸ M, ≤10⁻⁹ M, ≤10⁻¹⁰ M, or even ≤10⁻¹¹ M, or ≤10⁻¹² M. Whether a binding domain (immuno-)specifically reacts with or binds to a target can be tested readily e.g. by comparing the affinity of said binding domain to its desired target protein or antigen with the affinity of said binding domain to non-target proteins or antigens (here: proteins other than BCMA or CD3, respectively). Preferably, an antibody construct of the invention does not significantly bind to proteins or antigens other than BCMA or CD3, respectively (i.e., the first domain does not bind to proteins other than BCMA and the second domain does not bind to proteins other than CD3). For example, it is envisaged that the antibody construct of the invention (and more specifically its first domain) does not significantly bind to, interact with, recognize or cross-react with human BAFF-R and/or human TACI.

[0095] The equilibrium dissociation constant (KD) of an antibody construct of the invention to BCMA can be determined by Scatchard or by biacore analysis, as described e.g. in WO 2013/072406. The KD values for CD3 can e.g. be determined by surface plasmon resonance analysis, as described e.g. in WO 2013/072406. It is envisaged that the antibody construct of the present invention has a KD value for BCMA and/or for CD3 in the 2-digit or 1-digit nanomolar range or in the three digit or even two digit picomolar range.

[0096] The term “does not significantly bind” means that an antibody construct or binding domain of the present invention does not bind a protein or antigen other than BCMA or CD3, i.e., shows reactivity of ≤30%, preferably ≤20%, more preferably ≤10%, particularly preferably ≤9%, 8%, 7%, 6% or 5% with proteins or antigens other than BCMA or CD3, whereby binding to BCMA or CD3, respectively, is set to be 100%.

[0097] According to one embodiment of the antibody construct of the present invention, the first and/or the second domain are in the format of an scFv. In an scFv, the VH region and the and VL region are arranged in the order VH-VL or VL-VH (from N- to C-terminus). It is envisaged that the VH and the VL regions of the first and/or the second binding domain are connected via a linker, preferably a peptide linker. According to one embodiment of the first and/or the second domain, the VH-region is positioned N-terminally of the linker, and the VL-region is positioned C-terminally of the linker. It is furthermore envisaged that the first domain and the second domain of the antibody construct are connected via a linker, preferably a peptide linker. The linkers are preferably peptide linkers, more preferably short peptide linkers. Examples are shown in SEQ ID NOs: 686-699. In the present context, a “short” linker has between 2 and 50 amino acids, preferably between 3 and 35, between 4 and 30, between 5 and 25, between 6 and 20 or between 6 and 17 amino acids. The linker between two variable regions of one binding domain may have a different length (e.g. may be longer) than the linker between the two binding domains. For example, the linker between two variable regions of one binding domain may have a length between 7 and 15 amino acids, preferably between 9 and 13, and the linker between the two binding domains may have a length between 3 and 10 amino acids, preferably between 4 and 8. It is further envisaged that the peptide linkers are glycine/serine linkers, such as those depicted in SEQ ID NOs: 687, 689-699.

[0098] It is envisaged for the antibody construct of the present invention that
[0099] a) the antibody construct is a single chain polypeptide,
[0100] b) the first domain is in the format of an scFv,
[0101] c) the second domain is in the format of an scFv, and/or
[0102] d) the first and the second domain are connected via a linker, preferably a peptide linker, more preferably a glycine/serine linker.

[0103] The first domain of the antibody construct of the invention binds to BCMA (B cell maturation antigen, TNFRSF17, CD269). More preferably, it binds to BCMA on the surface of a target cell. The “target cell” can be any prokaryotic or eukaryotic cell expressing BCMA on its surface; preferably the target cell is a cell that is part of the human or animal body, such as a specific BCMA expressing cancer or tumor cell or a cell of a BCMA positive neoplasm. It is furthermore envisaged that the first domain binds to human BCMA, preferably to human BCMA on the surface of a target cell. It is also envisaged that the first domain binds to macaque BCMA, preferably to macaque BCMA on the surface of a target cell. A preferred amino acid sequence for human BCMA is depicted in SEQ ID NO: 647, for macaque BCMA in SEQ ID NO: 648, for the extracellular domain of human BCMA in SEQ ID NO: 649, for the extracellular domain of macaque BCMA in SEQ ID NO: 650.

[0104] In one embodiment of the present invention, the first domain of the antibody construct binds to epitope cluster 3 of BCMA. More preferably, it binds to epitope cluster 3 of human BCMA. A preferred amino acid sequence for epitope cluster 3 of human BCMA is depicted in SEQ ID NO: 651. Antibody constructs having domains that bind to said epitope cluster 3 of BCMA are described in detail in WO 2013/072406, the content of which is hereby incorporated by reference. These antibody constructs are shown in WO 2013/072406 to have a very beneficial epitope/activity relationship.

[0105] A method for BCMA epitope mapping is used in WO 2013/072406 and described in the following: One or more pre-defined regions (each in the form of a contiguous amino acid stretch) within the extracellular domain of human BCMA is exchanged/replaced with the corresponding region of a rodent BCMA molecule (such as murine BCMA, but other rodent species are also conceivable, so long as the binding domain is not cross-reactive with the rodent species used). These human BCMA/rodent (murine) BCMA chimeras are expressed on the surface of host cells (such as CHO cells). Binding of the antibody or antibody construct can be tested via FACS analysis. When the binding of the antibody or antibody construct to the chimeric molecule is entirely abolished, or when a significant binding decrease is observed, it can be concluded that the region of human BCMA which was removed from this chimeric molecule is relevant for the immunospecific epitope-paratope recognition. Said decrease in binding is preferably at least 10%, 20%, 30%, 40%, or 50%; more preferably at least 60%, 70%, or 80%, and most preferably 90%, 95% or even 100% in comparison to the binding to human (wild-type) BCMA, whereby binding to human BCMA is set to be 100%. Alternatively or additionally, the above described epitope mapping analysis can be modified by introducing one or more point mutations into the sequence of the extracellular domain of BCMA.

[0106] It is furthermore envisaged for the antibody construct of the present invention that the first domain which binds to BCMA comprises a VH region comprising CDR-H1, CDR-H2 and CDR-H3 and a VL region comprising CDR-L1, CDR-L2 and CDR-L3 selected from:
[0107] (1) CDR-H1 as depicted in SEQ ID NO: 1, CDR-H2 as depicted in SEQ ID NO: 2, CDR-H3 as depicted in SEQ ID NO: 3, CDR-L1 as depicted in SEQ ID NO: 4, CDR-L2 as depicted in SEQ ID NO: 5, and CDR-L3 as depicted in SEQ ID NO: 6;
[0108] (2) CDR-H1 as depicted in SEQ ID NO: 11, CDR-H2 as depicted in SEQ ID NO: 12, CDR-H3 as depicted in SEQ ID NO: 13, CDR-L1 as depicted in SEQ ID NO: 14, CDR-L2 as depicted in SEQ ID NO: 15, and CDR-L3 as depicted in SEQ ID NO: 16;
[0109] (3) CDR-H1 as depicted in SEQ ID NO: 21, CDR-H2 as depicted in SEQ ID NO: 22, CDR-H3 as depicted in SEQ ID NO: 23, CDR-L1 as depicted in SEQ ID NO: 24, CDR-L2 as depicted in SEQ ID NO: 25, and CDR-L3 as depicted in SEQ ID NO: 26;
[0110] (4) CDR-H1 as depicted in SEQ ID NO: 31, CDR-H2 as depicted in SEQ ID NO: 32, CDR-H3 as depicted in SEQ ID NO: 33, CDR-L1 as depicted in SEQ ID NO: 34, CDR-L2 as depicted in SEQ ID NO: 35, and CDR-L3 as depicted in SEQ ID NO: 36;
[0111] (5) CDR-H1 as depicted in SEQ ID NO: 41, CDR-H2 as depicted in SEQ ID NO: 42, CDR-H3 as depicted in SEQ ID NO: 43, CDR-L1 as depicted in SEQ ID NO: 44, CDR-L2 as depicted in SEQ ID NO: 45, and CDR-L3 as depicted in SEQ ID NO: 46;
[0112] (6) CDR-H1 as depicted in SEQ ID NO: 51, CDR-H2 as depicted in SEQ ID NO: 52, CDR-H3 as depicted in SEQ ID NO: 53, CDR-L1 as depicted in SEQ ID NO: 54, CDR-L2 as depicted in SEQ ID NO: 55, and CDR-L3 as depicted in SEQ ID NO: 56;
[0113] (7) CDR-H1 as depicted in SEQ ID NO: 61, CDR-H2 as depicted in SEQ ID NO: 62, CDR-H3 as depicted in SEQ ID NO: 63, CDR-L1 as depicted in SEQ ID NO: 64, CDR-L2 as depicted in SEQ ID NO: 65, and CDR-L3 as depicted in SEQ ID NO: 66;
[0114] (8) CDR-H1 as depicted in SEQ ID NO: 71, CDR-H2 as depicted in SEQ ID NO: 72, CDR-H3 as depicted in SEQ ID NO: 73, CDR-L1 as depicted in SEQ ID NO: 74, CDR-L2 as depicted in SEQ ID NO: 75, and CDR-L3 as depicted in SEQ ID NO: 76;
[0115] (9) CDR-H1 as depicted in SEQ ID NO: 81, CDR-H2 as depicted in SEQ ID NO: 82, CDR-H3 as depicted in SEQ ID NO: 83, CDR-L1 as depicted in SEQ ID NO: 84, CDR-L2 as depicted in SEQ ID NO: 85, and CDR-L3 as depicted in SEQ ID NO: 86;
[0116] (10) CDR-H1 as depicted in SEQ ID NO: 91, CDR-H2 as depicted in SEQ ID NO: 92, CDR-H3 as depicted in SEQ ID NO: 93, CDR-L1 as depicted in SEQ ID NO: 94, CDR-L2 as depicted in SEQ ID NO: 95, and CDR-L3 as depicted in SEQ ID NO: 96;
[0117] (11) CDR-H1 as depicted in SEQ ID NO: 101, CDR-H2 as depicted in SEQ ID NO: 102, CDR-H3 as depicted in SEQ ID NO: 103, CDR-L1 as depicted in SEQ ID NO: 104, CDR-L2 as depicted in SEQ ID NO: 105, and CDR-L3 as depicted in SEQ ID NO: 106;
[0118] (12) CDR-H1 as depicted in SEQ ID NO: 111, CDR-H2 as depicted in SEQ ID NO: 112, CDR-H3 as depicted in SEQ ID NO: 113, CDR-L1 as depicted in SEQ ID NO: 114, CDR-L2 as depicted in SEQ ID NO: 115, and CDR-L3 as depicted in SEQ ID NO: 116;
[0119] (13) CDR-H1 as depicted in SEQ ID NO: 121, CDR-H2 as depicted in SEQ ID NO: 122, CDR-H3 as depicted in SEQ ID NO: 123, CDR-L1 as depicted in SEQ ID NO: 124, CDR-L2 as depicted in SEQ ID NO: 125, and CDR-L3 as depicted in SEQ ID NO: 126;
[0120] (14) CDR-H1 as depicted in SEQ ID NO: 131, CDR-H2 as depicted in SEQ ID NO: 132, CDR-H3 as depicted in SEQ ID NO: 133, CDR-L1 as depicted in SEQ ID NO: 134, CDR-L2 as depicted in SEQ ID NO: 135, and CDR-L3 as depicted in SEQ ID NO: 136;
[0121] (15) CDR-H1 as depicted in SEQ ID NO: 141, CDR-H2 as depicted in SEQ ID NO: 142, CDR-H3 as depicted in SEQ ID NO: 143, CDR-L1 as depicted in SEQ ID NO: 144, CDR-L2 as depicted in SEQ ID NO: 145, and CDR-L3 as depicted in SEQ ID NO: 146;
[0122] (16) CDR-H1 as depicted in SEQ ID NO: 151, CDR-H2 as depicted in SEQ ID NO: 152, CDR-H3 as depicted in SEQ ID NO: 153, CDR-L1 as depicted in SEQ ID NO: 154, CDR-L2 as depicted in SEQ ID NO: 155, and CDR-L3 as depicted in SEQ ID NO: 156;
[0123] (17) CDR-H1 as depicted in SEQ ID NO: 161, CDR-H2 as depicted in SEQ ID NO: 162, CDR-H3 as depicted in SEQ ID NO: 163, CDR-L1 as depicted in SEQ ID NO: 164, CDR-L2 as depicted in SEQ ID NO: 165, and CDR-L3 as depicted in SEQ ID NO: 166;
[0124] (18) CDR-H1 as depicted in SEQ ID NO: 171, CDR-H2 as depicted in SEQ ID NO: 172, CDR-H3 as depicted in SEQ ID NO: 173, CDR-L1 as depicted in SEQ ID NO: 174, CDR-L2 as depicted in SEQ ID NO: 175, and CDR-L3 as depicted in SEQ ID NO: 176;
[0125] (19) CDR-H1 as depicted in SEQ ID NO: 181, CDR-H2 as depicted in SEQ ID NO: 182, CDR-H3 as depicted in SEQ ID NO: 183, CDR-L1 as depicted in SEQ ID NO: 184, CDR-L2 as depicted in SEQ ID NO: 185, and CDR-L3 as depicted in SEQ ID NO: 186;
[0126] (20) CDR-H1 as depicted in SEQ ID NO: 191, CDR-H2 as depicted in SEQ ID NO: 192, CDR-H3 as depicted in SEQ ID NO: 193, CDR-L1 as depicted in SEQ ID NO: 194, CDR-L2 as depicted in SEQ ID NO: 195, and CDR-L3 as depicted in SEQ ID NO: 196;
[0127] (21) CDR-H1 as depicted in SEQ ID NO: 201, CDR-H2 as depicted in SEQ ID NO: 202, CDR-H3 as depicted in SEQ ID NO: 203, CDR-L1 as depicted in SEQ ID NO: 204, CDR-L2 as depicted in SEQ ID NO: 205, and CDR-L3 as depicted in SEQ ID NO: 206;
[0128] (22) CDR-H1 as depicted in SEQ ID NO: 211, CDR-H2 as depicted in SEQ ID NO: 212, CDR-H3 as depicted in SEQ ID NO: 213, CDR-L1 as depicted in SEQ ID NO: 214, CDR-L2 as depicted in SEQ ID NO: 215, and CDR-L3 as depicted in SEQ ID NO: 216;
[0129] (23) CDR-H1 as depicted in SEQ ID NO: 221, CDR-H2 as depicted in SEQ ID NO: 222, CDR-H3 as depicted in SEQ ID NO: 223, CDR-L1 as depicted in SEQ ID NO: 224, CDR-L2 as depicted in SEQ ID NO: 225, and CDR-L3 as depicted in SEQ ID NO: 226;
[0130] (24) CDR-H1 as depicted in SEQ ID NO: 231, CDR-H2 as depicted in SEQ ID NO: 232, CDR-H3 as depicted in SEQ ID NO: 233, CDR-L1 as depicted in SEQ ID NO: 234, CDR-L2 as depicted in SEQ ID NO: 235, and CDR-L3 as depicted in SEQ ID NO: 236;
[0131] (25) CDR-H1 as depicted in SEQ ID NO: 241, CDR-H2 as depicted in SEQ ID NO: 242, CDR-H3 as depicted in SEQ ID NO: 243, CDR-L1 as depicted in SEQ ID NO: 244, CDR-L2 as depicted in SEQ ID NO: 245, and CDR-L3 as depicted in SEQ ID NO: 246;
[0132] (26) CDR-H1 as depicted in SEQ ID NO: 251, CDR-H2 as depicted in SEQ ID NO: 252, CDR-H3 as depicted in SEQ ID NO: 253, CDR-L1 as depicted in SEQ ID NO: 254, CDR-L2 as depicted in SEQ ID NO: 255, and CDR-L3 as depicted in SEQ ID NO: 256;
[0133] (27) CDR-H1 as depicted in SEQ ID NO: 261, CDR-H2 as depicted in SEQ ID NO: 262, CDR-H3 as depicted in SEQ ID NO: 263, CDR-L1 as depicted in SEQ ID NO: 264, CDR-L2 as depicted in SEQ ID NO: 265, and CDR-L3 as depicted in SEQ ID NO: 266;
[0134] (28) CDR-H1 as depicted in SEQ ID NO: 271, CDR-H2 as depicted in SEQ ID NO: 272, CDR-H3 as depicted in SEQ ID NO: 273, CDR-L1 as depicted in SEQ ID NO: 274, CDR-L2 as depicted in SEQ ID NO: 275, and CDR-L3 as depicted in SEQ ID NO: 276;
[0135] (29) CDR-H1 as depicted in SEQ ID NO: 281, CDR-H2 as depicted in SEQ ID NO: 282, CDR-H3 as depicted in SEQ ID NO: 283, CDR-L1 as depicted in SEQ ID NO: 284, CDR-L2 as depicted in SEQ ID NO: 285, and CDR-L3 as depicted in SEQ ID NO: 286;
[0136] (30) CDR-H1 as depicted in SEQ ID NO: 291, CDR-H2 as depicted in SEQ ID NO: 292, CDR-H3 as depicted in SEQ ID NO: 293, CDR-L1 as depicted in SEQ ID NO: 294, CDR-L2 as depicted in SEQ ID NO: 295, and CDR-L3 as depicted in SEQ ID NO: 296;
[0137] (31) CDR-H1 as depicted in SEQ ID NO: 301, CDR-H2 as depicted in SEQ ID NO: 302, CDR-H3 as depicted in SEQ ID NO: 303, CDR-L1 as depicted in SEQ ID NO: 304, CDR-L2 as depicted in SEQ ID NO: 305, and CDR-L3 as depicted in SEQ ID NO: 306;
[0138] (32) CDR-H1 as depicted in SEQ ID NO: 311, CDR-H2 as depicted in SEQ ID NO: 312, CDR-H3 as depicted in SEQ ID NO: 313, CDR-L1 as depicted in SEQ ID NO: 314, CDR-L2 as depicted in SEQ ID NO: 315, and CDR-L3 as depicted in SEQ ID NO: 316;
[0139] (33) CDR-H1 as depicted in SEQ ID NO: 321, CDR-H2 as depicted in SEQ ID NO: 322, CDR-H3 as depicted in SEQ ID NO: 323, CDR-L1 as depicted in SEQ ID NO: 324, CDR-L2 as depicted in SEQ ID NO: 325, and CDR-L3 as depicted in SEQ ID NO: 326;
[0140] (34) CDR-H1 as depicted in SEQ ID NO: 331, CDR-H2 as depicted in SEQ ID NO: 332, CDR-H3 as depicted in SEQ ID NO: 333, CDR-L1 as depicted in SEQ ID NO: 334, CDR-L2 as depicted in SEQ ID NO: 335, and CDR-L3 as depicted in SEQ ID NO: 336;
[0141] (35) CDR-H1 as depicted in SEQ ID NO: 341, CDR-H2 as depicted in SEQ ID NO: 342, CDR-H3 as depicted in SEQ ID NO: 343, CDR-L1 as depicted in SEQ ID NO: 344, CDR-L2 as depicted in SEQ ID NO: 345, and CDR-L3 as depicted in SEQ ID NO: 346;
[0142] (36) CDR-H1 as depicted in SEQ ID NO: 351, CDR-H2 as depicted in SEQ ID NO: 352, CDR-H3 as depicted in SEQ ID NO: 353, CDR-L1 as depicted in SEQ ID NO: 354, CDR-L2 as depicted in SEQ ID NO: 355, and CDR-L3 as depicted in SEQ ID NO: 356;
[0143] (37) CDR-H1 as depicted in SEQ ID NO: 361, CDR-H2 as depicted in SEQ ID NO: 362, CDR-H3 as depicted in SEQ ID NO: 363, CDR-L1 as depicted in SEQ ID NO: 364, CDR-L2 as depicted in SEQ ID NO: 365, and CDR-L3 as depicted in SEQ ID NO: 366;
[0144] (38) CDR-H1 as depicted in SEQ ID NO: 371, CDR-H2 as depicted in SEQ ID NO: 372, CDR-H3 as depicted in SEQ ID NO: 373, CDR-L1 as depicted in SEQ ID NO: 374, CDR-L2 as depicted in SEQ ID NO: 375, and CDR-L3 as depicted in SEQ ID NO: 376;
[0145] (39) CDR-H1 as depicted in SEQ ID NO: 381, CDR-H2 as depicted in SEQ ID NO: 382, CDR-H3 as depicted in SEQ ID NO: 383, CDR-L1 as depicted in SEQ ID NO: 384, CDR-L2 as depicted in SEQ ID NO: 385, and CDR-L3 as depicted in SEQ ID NO: 386;
[0146] (40) CDR-H1 as depicted in SEQ ID NO: 391, CDR-H2 as depicted in SEQ ID NO: 392, CDR-H3 as depicted in SEQ ID NO: 393, CDR-L1 as depicted in SEQ ID NO: 394, CDR-L2 as depicted in SEQ ID NO: 395, and CDR-L3 as depicted in SEQ ID NO: 396;
[0147] (41) CDR-H1 as depicted in SEQ ID NO: 401, CDR-H2 as depicted in SEQ ID NO: 402, CDR-H3 as depicted in SEQ ID NO: 403, CDR-L1 as depicted in SEQ ID NO: 404, CDR-L2 as depicted in SEQ ID NO: 405, and CDR-L3 as depicted in SEQ ID NO: 406;
[0148] (42) CDR-H1 as depicted in SEQ ID NO: 411, CDR-H2 as depicted in SEQ ID NO: 412, CDR-H3 as depicted in SEQ ID NO: 413, CDR-L1 as depicted in SEQ ID NO: 414, CDR-L2 as depicted in SEQ ID NO: 415, and CDR-L3 as depicted in SEQ ID NO: 416;
[0149] (43) CDR-H1 as depicted in SEQ ID NO: 421, CDR-H2 as depicted in SEQ ID NO: 422, CDR-H3 as depicted in SEQ ID NO: 423, CDR-L1 as depicted in SEQ ID NO: 424, CDR-L2 as depicted in SEQ ID NO: 425, and CDR-L3 as depicted in SEQ ID NO: 426;
[0150] (44) CDR-H1 as depicted in SEQ ID NO: 431, CDR-H2 as depicted in SEQ ID NO: 432, CDR-H3 as depicted in SEQ ID NO: 433, CDR-L1 as depicted in SEQ ID NO: 434, CDR-L2 as depicted in SEQ ID NO: 435, and CDR-L3 as depicted in SEQ ID NO: 436;
[0151] (45) CDR-H1 as depicted in SEQ ID NO: 441, CDR-H2 as depicted in SEQ ID NO: 442, CDR-H3 as depicted in SEQ ID NO: 443, CDR-L1 as depicted in SEQ ID NO: 444, CDR-L2 as depicted in SEQ ID NO: 445, and CDR-L3 as depicted in SEQ ID NO: 446;
[0152] (46) CDR-H1 as depicted in SEQ ID NO: 451, CDR-H2 as depicted in SEQ ID NO: 452, CDR-H3 as depicted in SEQ ID NO: 453, CDR-L1 as depicted in SEQ ID NO: 454, CDR-L2 as depicted in SEQ ID NO: 455, and CDR-L3 as depicted in SEQ ID NO: 456;
[0153] (47) CDR-H1 as depicted in SEQ ID NO: 461, CDR-H2 as depicted in SEQ ID NO: 462, CDR-H3 as depicted in SEQ ID NO: 463, CDR-L1 as depicted in SEQ ID NO: 464, CDR-L2 as depicted in SEQ ID NO: 465, and CDR-L3 as depicted in SEQ ID NO: 466;
[0154] (48) CDR-H1 as depicted in SEQ ID NO: 471, CDR-H2 as depicted in SEQ ID NO: 472, CDR-H3 as depicted in SEQ ID NO: 473, CDR-L1 as depicted in SEQ ID NO: 474, CDR-L2 as depicted in SEQ ID NO: 475, and CDR-L3 as depicted in SEQ ID NO: 476;
[0155] (49) CDR-H1 as depicted in SEQ ID NO: 481, CDR-H2 as depicted in SEQ ID NO: 482, CDR-H3 as depicted in SEQ ID NO: 483, CDR-L1 as depicted in SEQ ID NO: 484, CDR-L2 as depicted in SEQ ID NO: 485, and CDR-L3 as depicted in SEQ ID NO: 486;
[0156] (50) CDR-H1 as depicted in SEQ ID NO: 491, CDR-H2 as depicted in SEQ ID NO: 492, CDR-H3 as depicted in SEQ ID NO: 493, CDR-L1 as depicted in SEQ ID NO: 494, CDR-L2 as depicted in SEQ ID NO: 495, and CDR-L3 as depicted in SEQ ID NO: 496;
[0157] (51) CDR-H1 as depicted in SEQ ID NO: 501, CDR-H2 as depicted in SEQ ID NO: 502, CDR-H3 as depicted in SEQ ID NO: 503, CDR-L1 as depicted in SEQ ID NO: 504, CDR-L2 as depicted in SEQ ID NO: 505, and CDR-L3 as depicted in SEQ ID NO: 506;
[0158] (52) CDR-H1 as depicted in SEQ ID NO: 511, CDR-H2 as depicted in SEQ ID NO: 512, CDR-H3 as depicted in SEQ ID NO: 513, CDR-L1 as depicted in SEQ ID NO: 514, CDR-L2 as depicted in SEQ ID NO: 515, and CDR-L3 as depicted in SEQ ID NO: 516; and
[0159] (53) CDR-H1 as depicted in SEQ ID NO: 521, CDR-H2 as depicted in SEQ ID NO: 522, CDR-H3 as depicted in SEQ ID NO: 523, CDR-L1 as depicted in SEQ ID NO: 524, CDR-L2 as depicted in SEQ ID NO: 525, and CDR-L3 as depicted in SEQ ID NO: 526.

[0160] It is also envisaged for the antibody construct of the present invention that the first domain which binds to BCMA comprises a VL region having an amino acid sequence selected from the group consisting of those depicted in SEQ ID NOs: 8, 18, 28, 38, 48, 58, 68, 78, 88, 98, 108, 118, 128, 138, 148, 158, 168, 178, 188, 198, 208, 218, 228, 238, 248, 258, 268, 278, 288, 298, 308, 318, 328, 338, 348, 358, 368, 378, 388, 398, 408, 418, 428, 438, 448, 458, 468, 478, 488, 498, 508, 518, and 528. It is envisaged that the first domain comprises a VL region having an amino acid sequence as depicted in SEQ ID NO: 178.

[0161] It is furthermore envisaged that the first domain which binds to BCMA comprises a VH region having an amino acid sequence selected from the group consisting of those depicted in SEQ ID NOs: 7, 17, 27, 37, 47, 57, 67, 77, 87, 97, 107, 117, 127, 137, 147, 157, 167, 177, 187, 197, 207, 217, 227, 237, 247, 257, 267, 277, 287, 307, 317, 327, 337, 347, 357, 367, 377, 387, 397, 407, 417, 427, 437, 447, 457, 467, 477, 487, 497, 507, 517, and 527. It is envisaged that the first domain comprises a VL region having an amino acid sequence as depicted in SEQ ID NO: 177.

[0162] It is also envisaged for the antibody construct of the present invention that the first domain which binds to BCMA comprises a VH region and a VL region selected from the group consisting of:
[0163] (1) a VH region as depicted in SEQ ID NO: 7 and a VL region as depicted in SEQ ID NO: 8;
[0164] (2) a VH region as depicted in SEQ ID NO: 17 and a VL region as depicted in SEQ ID NO: 18;
[0165] (3) a VH region as depicted in SEQ ID NO: 27 and a VL region as depicted in SEQ ID NO: 28;
[0166] (4) a VH region as depicted in SEQ ID NO: 37 and a VL region as depicted in SEQ ID NO: 38;
[0167] (5) a VH region as depicted in SEQ ID NO: 47 and a VL region as depicted in SEQ ID NO: 48;
[0168] (6) a VH region as depicted in SEQ ID NO: 57 and a VL region as depicted in SEQ ID NO: 58;
[0169] (7) a VH region as depicted in SEQ ID NO: 67 and a VL region as depicted in SEQ ID NO: 68;
[0170] (8) a VH region as depicted in SEQ ID NO: 77 and a VL region as depicted in SEQ ID NO: 78;
[0171] (9) a VH region as depicted in SEQ ID NO: 87 and a VL region as depicted in SEQ ID NO: 88;
[0172] (10) a VH region as depicted in SEQ ID NO: 97 and a VL region as depicted in SEQ ID NO: 98;
[0173] (11) a VH region as depicted in SEQ ID NO: 107 and a VL region as depicted in SEQ ID NO: 108;
[0174] (12) a VH region as depicted in SEQ ID NO: 117 and a VL region as depicted in SEQ ID NO: 118;
[0175] (13) a VH region as depicted in SEQ ID NO: 127 and a VL region as depicted in SEQ ID NO: 128;
[0176] (14) a VH region as depicted in SEQ ID NO: 137 and a VL region as depicted in SEQ ID NO: 138;
[0177] (15) a VH region as depicted in SEQ ID NO: 147 and a VL region as depicted in SEQ ID NO: 148;
[0178] (16) a VH region as depicted in SEQ ID NO: 157 and a VL region as depicted in SEQ ID NO: 158;
[0179] (17) a VH region as depicted in SEQ ID NO: 167 and a VL region as depicted in SEQ ID NO: 168;
[0180] (18) a VH region as depicted in SEQ ID NO: 177 and a VL region as depicted in SEQ ID NO: 178;
[0181] (19) a VH region as depicted in SEQ ID NO: 187 and a VL region as depicted in SEQ ID NO: 188;
[0182] (20) a VH region as depicted in SEQ ID NO: 197 and a VL region as depicted in SEQ ID NO: 198;
[0183] (21) a VH region as depicted in SEQ ID NO: 207 and a VL region as depicted in SEQ ID NO: 208;
[0184] (22) a VH region as depicted in SEQ ID NO: 217 and a VL region as depicted in SEQ ID NO: 218;
[0185] (23) a VH region as depicted in SEQ ID NO: 227 and a VL region as depicted in SEQ ID NO: 228;
[0186] (24) a VH region as depicted in SEQ ID NO: 237 and a VL region as depicted in SEQ ID NO: 238;
[0187] (25) a VH region as depicted in SEQ ID NO: 247 and a VL region as depicted in SEQ ID NO: 248;
[0188] (26) a VH region as depicted in SEQ ID NO: 257 and a VL region as depicted in SEQ ID NO: 258;
[0189] (27) a VH region as depicted in SEQ ID NO: 267 and a VL region as depicted in SEQ ID NO: 268;
[0190] (28) a VH region as depicted in SEQ ID NO: 277 and a VL region as depicted in SEQ ID NO: 278;
[0191] (29) a VH region as depicted in SEQ ID NO: 287 and a VL region as depicted in SEQ ID NO: 288;
[0192] (30) a VH region as depicted in SEQ ID NO: 297 and a VL region as depicted in SEQ ID NO: 298;
[0193] (31) a VH region as depicted in SEQ ID NO: 307 and a VL region as depicted in SEQ ID NO: 308;
[0194] (32) a VH region as depicted in SEQ ID NO: 317 and a VL region as depicted in SEQ ID NO: 318;
[0195] (33) a VH region as depicted in SEQ ID NO: 327 and a VL region as depicted in SEQ ID NO: 328;
[0196] (34) a VH region as depicted in SEQ ID NO: 337 and a VL region as depicted in SEQ ID NO: 338;
[0197] (35) a VH region as depicted in SEQ ID NO: 347 and a VL region as depicted in SEQ ID NO: 348;
[0198] (36) a VH region as depicted in SEQ ID NO: 357 and a VL region as depicted in SEQ ID NO: 358;
[0199] (37) a VH region as depicted in SEQ ID NO: 367 and a VL region as depicted in SEQ ID NO: 368;
[0200] (38) a VH region as depicted in SEQ ID NO: 377 and a VL region as depicted in SEQ ID NO: 378;
[0201] (39) a VH region as depicted in SEQ ID NO: 387 and a VL region as depicted in SEQ ID NO: 388;
[0202] (40) a VH region as depicted in SEQ ID NO: 397 and a VL region as depicted in SEQ ID NO: 398;
[0203] (41) a VH region as depicted in SEQ ID NO: 407 and a VL region as depicted in SEQ ID NO: 408;
[0204] (42) a VH region as depicted in SEQ ID NO: 417 and a VL region as depicted in SEQ ID NO: 418;
[0205] (43) a VH region as depicted in SEQ ID NO: 427 and a VL region as depicted in SEQ ID NO: 428;
[0206] (44) a VH region as depicted in SEQ ID NO: 437 and a VL region as depicted in SEQ ID NO: 438;
[0207] (45) a VH region as depicted in SEQ ID NO: 447 and a VL region as depicted in SEQ ID NO: 448;
[0208] (46) a VH region as depicted in SEQ ID NO: 457 and a VL region as depicted in SEQ ID NO: 458;
[0209] (47) a VH region as depicted in SEQ ID NO: 467 and a VL region as depicted in SEQ ID NO: 468;
[0210] (48) a VH region as depicted in SEQ ID NO: 477 and a VL region as depicted in SEQ ID NO: 478;
[0211] (49) a VH region as depicted in SEQ ID NO: 487 and a VL region as depicted in SEQ ID NO: 488;
[0212] (50) a VH region as depicted in SEQ ID NO: 497 and a VL region as depicted in SEQ ID NO: 498;
[0213] (51) a VH region as depicted in SEQ ID NO: 507 and a VL region as depicted in SEQ ID NO: 508;
[0214] (52) a VH region as depicted in SEQ ID NO: 517 and a VL region as depicted in SEQ ID NO: 518; and
[0215] (53) a VH region as depicted in SEQ ID NO: 527 and a VL region as depicted in SEQ ID NO: 528.

[0216] It is envisaged that the first domain comprises a VH region having an amino acid sequence as depicted in SEQ ID NO: 177 and a VL region having an amino acid sequence as depicted in SEQ ID NO: 178.

[0217] It is also envisaged for the antibody construct of the present invention that the first domain which binds to BCMA comprises or consists of a polypeptide having an amino acid sequence selected from the group consisting of SEQ ID NOs: 9, 19, 29, 39, 49, 59, 69, 79, 89, 109, 129, 139, 149, 159, 169, 179, 189, 199, 209, 219, 229, 239, 249, 259, 269, 279, 289, 299, 309, 319, 329, 339, 349, 359, 369, 379, 389, 399, 409, 419, 429, 439, 449, 459, 469, 479, 489, 499, 519, and 529. It is envisaged that the first domain comprises or consists of a polypeptide having an amino acid sequence as depicted in SEQ ID NO: 179.

[0218] “T cells” or T lymphocytes are a type of lymphocyte (itself a type of white blood cell) that play a central role in cell-mediated immunity. There are several subsets of T cells, each with a distinct function. T cells can be distinguished from other lymphocytes, such as B cells and NK cells, by the presence of a T cell receptor (TCR) on the cell surface. The TCR is responsible for recognizing antigens bound to major histocompatibility complex (MHC) molecules and is composed of two different protein chains. In 95% of the T cells, the TCR consists of an alpha (α) and beta (β) chain. When the TCR engages with antigenic peptide and MHC (peptide/MHC complex), the T lymphocyte is activated through a series of biochemical events mediated by associated enzymes, co-receptors, specialized adaptor molecules, and activated or released transcription factors.

[0219] “CD3” (cluster of differentiation 3) is a T cell co-receptor composed of four chains. In mammals, the CD3 protein complex contains a CD3γ (gamma) chain, a CD3δ (delta) chain, and two CD3ε (epsilon) chains. These four chains associate with the T cell receptor (TCR) and the so-called ζ (zeta) chain to for the “T cell receptor complex” and to generate an activation signal in T lymphocytes. The CD3γ (gamma), CD3δ (delta), and CD3ε (epsilon) chains are highly related cell-surface proteins of the immunoglobulin superfamily and each contain a single extracellular immunoglobulin domain. The intracellular tails of the CD3 molecules contain a single conserved motif known as an immunoreceptor tyrosine-based activation motif (ITAM), which is essential for the signaling capacity of the TCR. The CD3 epsilon molecule is a polypeptide which in humans is encoded by the CD3E gene which resides on chromosome 11.

[0220] The redirected lysis of target cells via the recruitment of T cells by an antibody construct which binds to CD3 on the T cell and to a target protein on the target cell generally involves cytolytic synapse formation and delivery of perforin and granzymes. The engaged T cells are capable of serial target cell lysis, and are not affected by immune escape mechanisms interfering with peptide antigen processing and presentation, or clonal T cell differentiation; see, for example, WO 2007/042261.

[0221] Cytotoxicity mediated by BCMA×CD3 antibody constructs can be measured in various ways. The “half maximal effective concentration” (EC₅₀) is commonly used as a measure of potency of a biologically active molecule such as an antibody construct of the present invention. It is expressed in molar units. In the present case of measuring cytotoxicity, the EC₅₀ value refers to the concentration of an antibody construct inducing a cytotoxic response (lysis of target cells) halfway between the baseline and the maximum. Effector cells in a cytotoxicity assay can e.g. be stimulated enriched (human) CD8 positive T cells or unstimulated (human) peripheral blood mononuclear cells (PBMC). The target cells should express BCMA on the cell surface. Preferably the target cells express (at least) the extracellular domain of BCMA on the cell surface. Target cells can be a cell line (such as CHO) which is stably or transiently transfected with BCMA, e.g. human BCMA. Alternatively, the target cells can be a BCMA positive natural expresser cell line, such as the human multiple myeloma cell line L363 or NCI-H929.

[0222] The effector to target cell (E:T) ratio in a cytotoxicity assay is usually about 10:1, but can also vary. Cytotoxic activity of BCMA×CD3 antibody constructs can be measured in a 51-chromium release assay (e.g. with an incubation time of about 18 hours) or in a in a FACS-based cytotoxicity assay (e.g. with an incubation time of about 48 hours). Modifications of the incubation time (cytotoxic reaction) are also envisaged. Other methods of measuring cytotoxicity are well-known and comprise MTT or MTS assays, ATP-based assays including bioluminescent assays, the sulforhodamine B (SRB) assay, WST assay, clonogenic assay and the ECIS technology.

[0223] According to one embodiment, the cytotoxic activity mediated by BCMA×CD3 antibody constructs of the present invention is measured in a FACS-based cytotoxicity assay. It is envisaged that the EC₅₀ value of the BCMA×CD3 antibody constructs is ≤5000 pM or ≤4000 pM, more preferably ≤3000 pM or ≤2000 pM, even more preferably ≤1000 pM or ≤500 pM, even more preferably ≤400 pM or ≤300 pM, even more preferably ≤200 pM, even more preferably ≤100 pM, even more preferably ≤50 pM, even more preferably ≤20 pM or ≤10 pM, and most preferably ≤5 pM. It is also envisaged that the antibody construct of the present invention has an EC50 value in the 3-digit, 2-digit or 1-digit pg/ml range, as determined in a FACS-based cytotoxicity assay. The assay may be carried out with the L363 or NCI-H929 cell line or with BCMA transfected CHO cells as target cells and stimulated enriched (human) CD8 positive T cells or unstimulated (human) PBMC as effector cells. See also WO 2013/072406.

[0224] The second domain of the antibody construct of the invention binds to CD3. More preferably, it binds to CD3 on the surface of a T cell. It is furthermore envisaged that the second domain binds to human CD3, preferably to human CD3 on the surface of a T cell. It is also envisaged that the second domain binds to CD3 epsilon. More preferably, it binds to human CD3 epsilon, e.g. to human CD3 epsilon on the surface of a T cell. A preferred amino acid sequence for the extracellular domain of human CD3 epsilon is depicted in SEQ ID NO: 653.

[0225] In one embodiment of the present invention, the second domain of the antibody construct binds to human CD3 epsilon (or human CD3 epsilon on the surface of a T cell) and to Callithrix jacchus or Saimiri sciureus CD3 epsilon. It is also envisaged that the second domain binds to an extracellular epitope of CD3 epsilon, preferably to an extracellular epitope of human CD3 epsilon. It is also envisaged that the second domain binds to an extracellular epitope of the human and the Macaca CD3 epsilon chain. One preferred epitope of CD3 epsilon is comprised within amino acid residues 1-27 of the human CD3 epsilon extracellular domain (see SEQ ID NO: 654). Even more specifically, the epitope comprises at least the amino acid sequence Gln-Asp-Gly-Asn-Glu. Callithrix jacchus is a new world primate belonging to the family of Callitrichidae, while Saimiri sciureus is a new world primate belonging to the family of Cebidae. Binders having such characteristics are described in detail in WO 2008/119567.

[0226] Antibodies or bispecific antibody constructs directed against (human) CD3 or specifically against CD3 epsilon are known in the art, and their CDRs, VH and VL sequences can serve as a basis for the second binding domain of the antibody construct of the invention. For example, Kung et al. reported in 1979 the development of OKT3 (Ortho Kung T3), the first mAb recognizing CD3 (specifically, the epsilon chain of CD3) on human T cells. OKT3 (muromonab) was the first monoclonal antibody of murine origin to become available for therapy in humans. Newer anti-CD3 monoclonal antibodies include otelixizumab (TRX4), teplizumab (MGA031), foralumab and visilizumab, all targeting the epsilon chain of CD3. Bispecific antibody constructs directed against a (cancer) target and CD3 are also being developed and (pre-)clinically tested, and their CD3 binding domain (CDRs, VH, VL) may serve as a basis for the second binding domain of the antibody construct of the invention. Examples include, but are not limited to, Blinatumomab, Solitomab (MT110, AMG 110), Catumaxomab, Duvortuxizumab, Ertumaxomab, Mosunetuzumab, FBTA05 (Bi20, TPBs05), CEA-TCB (RG7802, RO6958688), AFM11, and MGD006 (S80880). Other examples of CD3 binding domains are disclosed e.g. in U.S. Pat. Nos. 7,994,289 B2, 7,728,114 B2, 7,381,803 B1, 6,706,265 B1.

[0227] It is envisaged for the antibody construct of the present invention that the second domain which binds to CD3 comprises a VL region comprising CDR-L1, CDR-L2 and CDR-L3 selected from:
[0228] (a) CDR-L1 as depicted in SEQ ID NO: 542, CDR-L2 as depicted in SEQ ID NO: 543, and CDR-L3 as depicted in SEQ ID NO: 544;
[0229] (b) CDR-L1 as depicted in SEQ ID NO: 599, CDR-L2 as depicted in SEQ ID NO: 600, and CDR-L3 as depicted in SEQ ID NO: 601; and
[0230] (c) CDR-L1 as depicted in SEQ ID NO: 621, CDR-L2 as depicted in SEQ ID NO: 622, and CDR-L3 as depicted in SEQ ID NO: 623.

[0231] It is also envisaged for the antibody construct of the present invention that the second domain which binds to CD3 comprises a VH region comprising CDR-H1, CDR-H2 and CDR-H3 selected from:
[0232] (a) CDR-H1 as depicted in SEQ ID NO: 534, CDR-H2 as depicted in SEQ ID NO: 535, and CDR-H3 as depicted in SEQ ID NO: 536;
[0233] (b) CDR-H1 as depicted in SEQ ID NO: 545, CDR-H2 as depicted in SEQ ID NO: 546, and CDR-H3 as depicted in SEQ ID NO: 547;
[0234] (c) CDR-H1 as depicted in SEQ ID NO: 557, CDR-H2 as depicted in SEQ ID NO: 558, and CDR-H3 as depicted in SEQ ID NO: 559;
[0235] (d) CDR-H1 as depicted in SEQ ID NO: 568, CDR-H2 as depicted in SEQ ID NO: 569, and CDR-H3 as depicted in SEQ ID NO: 570;
[0236] (e) CDR-H1 as depicted in SEQ ID NO: 579, CDR-H2 as depicted in SEQ ID NO: 580, and CDR-H3 as depicted in SEQ ID NO: 581;
[0237] (f) CDR-H1 as depicted in SEQ ID NO: 591, CDR-H2 as depicted in SEQ ID NO: 592, and CDR-H3 as depicted in SEQ ID NO: 593;
[0238] (g) CDR-H1 as depicted in SEQ ID NO: 602, CDR-H2 as depicted in SEQ ID NO: 603, and CDR-H3 as depicted in SEQ ID NO: 604;
[0239] (h) CDR-H1 as depicted in SEQ ID NO: 613, CDR-H2 as depicted in SEQ ID NO: 614, and CDR-H3 as depicted in SEQ ID NO: 615;
[0240] (i) CDR-H1 as depicted in SEQ ID NO: 624, CDR-H2 as depicted in SEQ ID NO: 625, and CDR-H3 as depicted in SEQ ID NO: 626; and
[0241] (j) CDR-H1 as depicted in SEQ ID NO: 636, CDR-H2 as depicted in SEQ ID NO: 637, and CDR-H3 as depicted in SEQ ID NO: 638.

[0242] It is furthermore envisaged for the antibody construct of the present invention that the second domain which binds to CD3 comprises a VL region comprising CDR-L1, CDR-L2 and CDR-L3 and a VH region comprising CDR-H1, CDR-H2 and CDR-H3 selected from:
[0243] (a) CDR-L1 as depicted in SEQ ID NO: 531, CDR-L2 as depicted in SEQ ID NO: 532, CDR-L3 as depicted in SEQ ID NO: 533, CDR-H1 as depicted in SEQ ID NO: 534, CDR-H2 as depicted in SEQ ID NO: 535, and CDR-H3 as depicted in SEQ ID NO: 536;
[0244] (b) CDR-L1 as depicted in SEQ ID NO: 542, CDR-L2 as depicted in SEQ ID NO: 543, CDR-L3 as depicted in SEQ ID NO: 544, CDR-H1 as depicted in SEQ ID NO: 545, CDR-H2 as depicted in SEQ ID NO: 546, and CDR-H3 as depicted in SEQ ID NO: 547;
[0245] (c) CDR-L1 as depicted in SEQ ID NO: 554, CDR-L2 as depicted in SEQ ID NO: 555, CDR-L3 as depicted in SEQ ID NO: 556, CDR-H1 as depicted in SEQ ID NO: 557, CDR-H2 as depicted in SEQ ID NO: 558, and CDR-H3 as depicted in SEQ ID NO: 559;
[0246] (d) CDR-L1 as depicted in SEQ ID NO: 565, CDR-L2 as depicted in SEQ ID NO: 566, CDR-L3 as depicted in SEQ ID NO: 567, CDR-H1 as depicted in SEQ ID NO: 568, CDR-H2 as depicted in SEQ ID NO: 569, and CDR-H3 as depicted in SEQ ID NO: 570;
[0247] (e) CDR-L1 as depicted in SEQ ID NO: 576, CDR-L2 as depicted in SEQ ID NO: 577, CDR-L3 as depicted in SEQ ID NO: 578, CDR-H1 as depicted in SEQ ID NO: 579, CDR-H2 as depicted in SEQ ID NO: 580, and CDR-H3 as depicted in SEQ ID NO: 581;
[0248] (f) CDR-L1 as depicted in SEQ ID NO: 588, CDR-L2 as depicted in SEQ ID NO: 589, CDR-L3 as depicted in SEQ ID NO: 590, CDR-H1 as depicted in SEQ ID NO: 591, CDR-H2 as depicted in SEQ ID NO: 592, and CDR-H3 as depicted in SEQ ID NO: 593;
[0249] (g) CDR-L1 as depicted in SEQ ID NO: 599, CDR-L2 as depicted in SEQ ID NO: 600, CDR-L3 as depicted in SEQ ID NO: 601, CDR-H1 as depicted in SEQ ID NO: 602, CDR-H2 as depicted in SEQ ID NO: 603, and CDR-H3 as depicted in SEQ ID NO: 604;
[0250] (h) CDR-L1 as depicted in SEQ ID NO: 610, CDR-L2 as depicted in SEQ ID NO: 611, CDR-L3 as depicted in SEQ ID NO: 612, CDR-H1 as depicted in SEQ ID NO: 613, CDR-H2 as depicted in SEQ ID NO: 614, and CDR-H3 as depicted in SEQ ID NO: 615;
[0251] (i) CDR-L1 as depicted in SEQ ID NO: 621, CDR-L2 as depicted in SEQ ID NO: 622, CDR-L3 as depicted in SEQ ID NO: 623, CDR-H1 as depicted in SEQ ID NO: 624, CDR-H2 as depicted in SEQ ID NO: 625, and CDR-H3 as depicted in SEQ ID NO: 626; and
[0252] (j) CDR-L1 as depicted in SEQ ID NO: 633, CDR-L2 as depicted in SEQ ID NO: 634, CDR-L3 as depicted in SEQ ID NO: 635, CDR-H1 as depicted in SEQ ID NO: 636, CDR-H2 as depicted in SEQ ID NO: 637, and CDR-H3 as depicted in SEQ ID NO: 638.

[0253] It is also envisaged for the antibody construct of the present invention that the second domain which binds to CD3 comprises a VL region having an amino acid sequence selected from the group consisting of those depicted in SEQ ID NO: 550, SEQ ID NO: 551, SEQ ID NO: 584, SEQ ID NO: 585, SEQ ID NO: 629 and SEQ ID NO: 630.

[0254] It is furthermore envisaged that the second domain which binds to CD3 comprises a VH region having an amino acid sequence selected from the group consisting of those depicted in SEQ ID NO: 537, SEQ ID NO: 538, SEQ ID NO: 548, SEQ ID NO: 549, SEQ ID NO: 560, SEQ ID NO: 561, SEQ ID NO: 571, SEQ ID NO: 572, SEQ ID NO: 582, SEQ ID NO: 583, SEQ ID NO: 594, SEQ ID NO: 595, SEQ ID NO: 605, SEQ ID NO: 606, SEQ ID NO: 616, SEQ ID NO: 617, SEQ ID NO: 627, SEQ ID NO: 628, SEQ ID NO: 639, SEQ ID NO: 640, and SEQ ID NO: 644.

[0255] It is also envisaged for the antibody construct of the present invention that the second domain which binds to CD3 comprises a VL region and a VH region selected from the group consisting of:
[0256] (a) a VL region as depicted in SEQ ID NO: 539 or 521 and a VH region as depicted in SEQ ID NO: 537 or 538;
[0257] (b) a VL region as depicted in SEQ ID NO: 550 or 521 and a VH region as depicted in SEQ ID NO: 548 or 549;
[0258] (c) a VL region as depicted in SEQ ID NO: 562 or 521 and a VH region as depicted in SEQ ID NO: 560 or 561;
[0259] (d) a VL region as depicted in SEQ ID NO: 573 or 521 and a VH region as depicted in SEQ ID NO: 571 or 572;
[0260] (e) a VL region as depicted in SEQ ID NO: 584 or 585 and a VH region as depicted in SEQ ID NO: 582 or 583;
[0261] (f) a VL region as depicted in SEQ ID NO: 596 or 521 and a VH region as depicted in SEQ ID NO: 594 or 595;
[0262] (g) a VL region as depicted in SEQ ID NO: 607 or 585 and a VH region as depicted in SEQ ID NO: 605 or 606;
[0263] (h) a VL region as depicted in SEQ ID NO: 618 or 521 and a VH region as depicted in SEQ ID NO: 616 or 617;
[0264] (i) a VL region as depicted in SEQ ID NO: 629 or 630 and a VH region as depicted in SEQ ID NO: 627 or 628;
[0265] (j) a VL region as depicted in SEQ ID NO: 641 or 630 and a VH region as depicted in SEQ ID NO: 639 or 640; and
[0266] (k) a VL region as depicted in SEQ ID NO: 645 and a VH region as depicted in SEQ ID NO: 644.

[0267] It is also envisaged for the antibody construct of the present invention that the second domain which binds to CD3 comprises or consists of a polypeptide having an amino acid sequence selected from the group consisting of those depicted in SEQ ID NOs: 540, 541, 552, 553, 563, 564, 574, 575, 586, 587, 597, 598, 608, 609, 619, 620, 631, 632, 642, 643, and 646.

[0268] It is also envisaged that the antibody construct of the present invention competes for binding to CD3 with:

[0269] a) an antibody or antibody construct comprising a domain which binds to CD3 on the surface of a T cell, wherein said domain comprises a VH region comprising CDR-H1 as depicted in SEQ ID NO: 636, CDR-H2 as depicted in SEQ ID NO: 637, and CDR-H3 as depicted in SEQ ID NO: 638, and a VL region comprising CDR-L1 as depicted in SEQ ID NO: 633, CDR-L2 as depicted in SEQ ID NO: 634, CDR-L3 as depicted in SEQ ID NO: 635;

[0270] b) an antibody or antibody construct comprising a domain which binds to CD3 on the surface of a T cell, wherein said domain comprises a VH region as depicted in SEQ ID NO: 639, and a VL region as depicted in SEQ ID NO: 641;

[0271] c) an antibody construct comprising a domain which binds to CD3 on the surface of a T cell, wherein said domain comprises the amino acid sequence as depicted in SEQ ID NO: 642; or

[0272] d) an antibody construct having the amino acid sequence as depicted in SEQ ID NO: 661.

[0273] It is also envisaged that the antibody construct of the present invention binds to the same epitope of CD3 as:

[0274] a) an antibody or antibody construct comprising a domain which binds to CD3 on the surface of a T cell, wherein said domain comprises a VH region comprising CDR-H1 as depicted in SEQ ID NO: 636, CDR-H2 as depicted in SEQ ID NO: 637, and CDR-H3 as depicted in SEQ ID NO: 638, and a VL region comprising CDR-L1 as depicted in SEQ ID NO: 633, CDR-L2 as depicted in SEQ ID NO: 634, CDR-L3 as depicted in SEQ ID NO: 635;

[0275] b) an antibody or antibody construct comprising a domain which binds to CD3 on the surface of a T cell, wherein said domain comprises a VH region as depicted in SEQ ID NO: 639, and a VL region as depicted in SEQ ID NO: 641;

[0276] c) an antibody construct comprising a domain which binds to CD3 on the surface of a T cell, wherein said domain comprises the amino acid sequence as depicted in SEQ ID NO: 642; or

[0277] d) an antibody construct having the amino acid sequence as depicted in SEQ ID NO: 661.

[0278] It is furthermore envisaged that the antibody construct of the present invention comprises a polypeptide having an amino acid sequence selected from the group consisting of those depicted in SEQ ID NOs: 10, 20, 30, 40, 50, 60, 70, 80, 90, 100, 110, 120, 130, 140, 150, 160, 170, 180, 190, 200, 210, 220, 230, 240, 250, 260, 270, 280, 290, 300, 310, 320, 330, 340, 350, 360, 370, 380, 390, 400, 410, 420, 430, 440, 450, 460, 470, 480, 490, 500, 510, 520, and 530. It is envisaged that the antibody construct of the present invention comprises a polypeptide having an amino acid sequence as depicted in SEQ ID NO: 180.

[0279] It is also envisaged that the antibody construct of the present invention comprises or consists of a polypeptide which has an amino acid sequence selected from the group consisting of those depicted in SEQ ID NOs: 10, 20, 30, 40, 50, 60, 70, 80, 90, 100, 110, 120, 130, 140, 150, 160, 170, 180, 190, 200, 210, 220, 230, 240, 250, 260, 270, 280, 290, 300, 310, 320, 330, 340, 350, 360, 370, 380, 390, 400, 410, 420, 430, 440, 450, 460, 470, 480, 490, 500, 510, 520, and 530, and which is linked at its N-terminus or at its C-terminus with a protein purification tag, preferably via a peptide bond (amide bond). The linking of the protein purification tag at the C-terminus of the polypeptide is preferred. It is envisaged that the protein purification tag is a short peptide. For example, the length of the short peptide may be 2-30 amino acids, 4-25 amino acids, 5-20 amino acids or 6-19 amino acids. Examples of protein purification tags include, but are not limited to, AU1 epitope (e.g. as depicted in SEQ ID NO: 666), AU5 epitope (e.g. as depicted in SEQ ID NO: 667), T7-tag (e.g. as depicted in SEQ ID NO: 668), V5-tag (e.g. as depicted in SEQ ID NO: 669), B-tag (e.g. as depicted in SEQ ID NO: 670), E2 epitope (e.g. as depicted in SEQ ID NO: 671), FLAG epitope/FLAG tag (e.g. as depicted in SEQ ID NO: 672), Glu-Glu tag (e.g. as depicted in SEQ ID NOs: 673 or 674), HA tag, Histidine affinity tag (e.g. as depicted in SEQ ID NO: 675), HSV epitope (e.g. as depicted in SEQ ID NO: 676), KT3 epitope (e.g. as depicted in SEQ ID NO: 677), Myc epitope (e.g. as depicted in SEQ ID NO: 678), polyarginine tag (5-6 Arg residues), polyaspartate tag (5-16 Asp residues), polyhistidine tag (2-10 His residues, usually 6 His residues, see e.g. SEQ ID NOs: 662-665), polyphenylalanine tag (usually 11 Phe residues), S1 tag (e.g. as depicted in SEQ ID NO: 679), S-tag (e.g. as depicted in SEQ ID NO: 680), Strep-tag (e.g. as depicted in SEQ ID NOs: 681 or 682), universal tag (e.g. as depicted in SEQ ID NO: 683), VSV-G (e.g. as depicted in SEQ ID NO: 684), Protein C (e.g. as depicted in SEQ ID NO: 685), and Protein A. A histidine tag is preferred, especially a 6× His tag (SEQ ID NO: 663). Is it hence further envisaged that the antibody construct of the present invention consists of a polypeptide which has an amino acid sequence selected from the group consisting of those depicted in SEQ ID NOs: 10, 20, 30, 40, 50, 60, 70, 80, 90, 100, 110, 120, 130, 140, 150, 160, 170, 180, 190, 200, 210, 220, 230, 240, 250, 260, 270, 280, 290, 300, 310, 320, 330, 340, 350, 360, 370, 380, 390, 400, 410, 420, 430, 440, 450, 460, 470, 480, 490, 500, 510, 520, and 530, and which is linked at its C-terminus with a 6× His tag via a peptide bond. One embodiment of the antibody construct of the present invention has an amino acid sequence as depicted in SEQ ID NO: 661.

[0280] It is also envisaged that the antibody construct of the present invention binds to the same epitope of BCMA as:

[0281] a) an antibody or antibody construct comprising a domain which binds to BCMA on the surface of a target cell, wherein said domain comprises a VH region comprising CDR-H1 as depicted in SEQ ID NO: 171, CDR-H2 as depicted in SEQ ID NO: 172, and CDR-H3 as depicted in SEQ ID NO: 173, and a VL region comprising CDR-L1 as depicted in SEQ ID NO: 174, CDR-L2 as depicted in SEQ ID NO: 175, and CDR-L3 as depicted in SEQ ID NO: 176;

[0282] b) an antibody or antibody construct comprising a domain which binds to BCMA on the surface of a target cell, wherein said domain comprises a VH region as depicted in SEQ ID NO: 177, and a VL region as depicted in SEQ ID NO: 178;

[0283] c) an antibody construct comprising a domain which binds to BCMA on the surface of a target cell, wherein said domain comprises the amino acid sequence as depicted in SEQ ID NO: 179; or

[0284] d) an antibody construct having the amino acid sequence as depicted in SEQ ID NO: 661.

[0285] Whether or not an antibody, antibody construct or binding domain binds to the same epitope of BCMA/BCMA on the surface of a target cell as another given antibody, antibody construct or binding domain can be measured by different analyses, e.g. by epitope mapping with chimeric or mutated BCMA molecules, as described in WO 2013/072406. Another possibility to identify the epitope within a target is an Alanine scanning assay (see e.g. Morrison K L & Weiss G A. Curr Opin Chem Biol. 2001 June; 5(3):302-7), where each residue within the target (here: BCMA) to be analyzed is replaced by alanine, e.g. via site-directed mutagenesis. Alanine is used because of its non-bulky, chemically inert, methyl functional group that nevertheless mimics the secondary structure references that many of the other amino acids possess.

[0286] Sometimes bulky amino acids such as valine or leucine can be used in cases where conservation of the size of mutated residues is desired. Alanine scanning is usually accomplished by site-directed mutagenesis or randomly by creating a PCR library. Furthermore, computational methods to estimate thermodynamic parameters based on theoretical alanine substitutions have been developed. The data can be tested by IR, NMR Spectroscopy, mathematical methods, bioassays, etc. The same analysis can of course be applied for other targets such as CD3.

[0287] It is also envisaged that the antibody construct of the present invention competes for binding to BCMA with:

[0288] a) an antibody or antibody construct comprising a domain which binds to BCMA on the surface of a target cell, wherein said domain comprises a VH region comprising CDR-H1 as depicted in SEQ ID NO: 171, CDR-H2 as depicted in SEQ ID NO: 172, and CDR-H3 as depicted in SEQ ID NO: 173, and a VL region comprising CDR-L1 as depicted in SEQ ID NO: 174, CDR-L2 as depicted in SEQ ID NO: 175, and CDR-L3 as depicted in SEQ ID NO: 176;

[0289] b) an antibody or antibody construct comprising a domain which binds to BCMA on the surface of a target cell, wherein said domain comprises a VH region as depicted in SEQ ID NO: 177, and a VL region as depicted in SEQ ID NO: 178;

[0290] c) an antibody construct comprising a domain which binds to BCMA on the surface of a target cell, wherein said domain comprises the amino acid sequence as depicted in SEQ ID NO: 179; or

[0291] d) an antibody construct having the amino acid sequence as depicted in SEQ ID NO: 661.

[0292] Whether or not an antibody or antibody construct competes for binding to BCMA/BCMA on the surface of a target cell with another given antibody or antibody construct can be measured in a competition assay such as a competitive ELISA or a cell-based competition assay (using either cells that naturally express BCMA or cells that were stably or transiently transformed with BCMA). Avidin-coupled microparticles (beads) can also be used. Similar to an avidin-coated ELISA plate, when reacted with a biotinylated protein, each of these beads can be used as a substrate on which an assay can be performed. Antigen is coated onto a bead and then precoated with the first antibody. The second antibody is added, and any additional binding is determined. Read-out occurs via flow cytometry. The term “competes for binding”, in the present context, means that competition occurs between the two tested antibodies of at least 20%, at least 30%, at least 40%, at least 50%, at least 60%, at least 70%, at least 80% or at least 90%, as determined by any one of the assays disclosed above. The same analysis can of course be applied for other targets such as CD3.

[0293] The antibody construct of the present invention, or one or both of its binding domains, may be “humanized” or “human”. “Humanized” antibodies, variants or fragments thereof, antibody constructs and binding domains are based on immunoglobulins of mostly human sequences, which contain (a) minimal sequence(s) derived from non-human immunoglobulin. For the most part, humanized antibodies, variants or fragments thereof, antibody constructs and binding domains are based on human immunoglobulins (recipient antibodies) in which residues from a hypervariable region or CDR are replaced by residues from a hypervariable region or CDR of a non-human species (donor antibody) such as a rodent (e.g. mouse, hamster, rat or rabbit) having the desired specificity, affinity, capacity and/or biological activity. In some instances, Fv framework region (FR) residues of the human immunoglobulin are replaced by corresponding non-human residues. Furthermore, “humanized” antibodies, variants or fragments thereof, antibody constructs and binding domains as used herein may also comprise residues which are found neither in the recipient antibody nor the donor antibody. These modifications are made to further refine and optimize antibody performance. The humanized antibodies, variants or fragments thereof, antibody constructs and binding domains may also comprise at least a portion of an immunoglobulin constant region (such as Fc), typically that of a human immunoglobulin. For further details, see Jones et al., Nature, 321: 522-525 (1986); Reichmann et al., Nature, 332: 323-329 (1988); and Presta, Curr. Op. Struct. Biol., 2: 593-596 (1992).

[0294] Human anti-mouse antibody (HAMA) responses have led the industry to prepare chimeric or otherwise humanized antibodies/antibody constructs. It is however expected that certain human anti-chimeric antibody (HACA) responses will be observed, particularly in chronic or multi-dose utilizations of an antibody or antibody construct. Thus, it would be desirable to provide antibody constructs comprising a human binding domain against BCMA and/or a human binding domain against CD3, in order to vitiate concerns and/or effects of HAMA or HACA response.

[0295] Therefore, according to one embodiment, the antibody construct, the first binding domain and/or the second binding domain are “human”. The term “human antibody”, “human antibody construct” and “human binding domain” includes antibodies, antibody constructs and binding domains, respectively, having antibody-derived regions such as variable and constant regions or domains which correspond substantially to human germline immunoglobulin sequences known in the art, including, for example, those described by Kabat et al. (1991) (loc. cit.). The human antibody constructs or binding domains of the invention may include amino acid residues not encoded by human germline immunoglobulin sequences (e.g., mutations introduced by random or site-specific mutagenesis in vitro or by somatic mutation in vivo), for example in the CDRs, and in particular in CDR3. The human antibody constructs or binding domains can have at least one, two, three, four, five, or more positions replaced with an amino acid residue that is not encoded by the human germline immunoglobulin sequence. The definition of human antibodies, antibody constructs and binding domains as used herein also contemplates fully human antibodies, antibody constructs and binding domains which include only non-artificially and/or genetically altered human sequences of antibodies as those can be derived by using technologies or systems such as the Xenomouse.

[0296] Antibody constructs comprising at least one human binding domain avoid some of the problems associated with antibodies or antibody constructs that possess non-human such as rodent (e.g. murine, rat, hamster or rabbit) variable and/or constant regions. The presence of such rodent derived proteins can lead to the rapid clearance of the antibodies or antibody constructs or can lead to the generation of an immune response against the antibody or antibody construct by a patient. To avoid the use of rodent-derived antibody constructs, humanized or fully human antibody constructs can be generated through the introduction of human antibody function into a rodent so that the rodent produces fully human antibodies.

[0297] In some embodiments, the antibody construct of the invention is an “isolated” or “substantially pure” antibody construct. “Isolated” or “substantially pure”, when used to describe the antibody constructs disclosed herein, means an antibody construct that has been identified, separated and/or recovered from a component of its production environment. Preferably, the antibody construct is free or substantially free of association with all other components from its production environment. Contaminant components of its production environment, such as that resulting from recombinant transfected cells, are materials that could interfere with diagnostic or therapeutic uses for the antibody construct, and may include enzymes, hormones, and other proteinaceous or non-proteinaceous compounds. It is understood that the isolated or substantially pure antibody construct may constitute from 5% to 99.9% by weight of the total protein/polypeptide content in a given sample, depending on the circumstances. The desired antibody construct may be produced at a significantly higher concentration through the use of an inducible promoter or high expression promoter. The definition includes the production of an antibody construct in a wide variety of organisms and/or host cells that are known in the art. In certain embodiments, the antibody construct will be purified (1) to a degree sufficient to obtain at least 15 residues of N-terminal or internal amino acid sequence by use of a spinning cup sequenator, or (2) to homogeneity by SDS-PAGE under non-reducing or reducing conditions using Coomassie blue or, preferably, silver staining. Usually, however, an isolated antibody construct will be prepared by at least one purification step.

[0298] According to one embodiment, the entire antibody construct and/or the binding domains are in the form of one or more polypeptides or in the form of proteins. In addition to proteinaceous parts, such polypeptides or proteins may include non-proteinaceous parts (e.g. chemical linkers or chemical cross-linking agents such as glutaraldehyde).

[0299] Peptides are short chains of amino acid monomers linked by covalent peptide (amide) bonds. Hence, peptides fall under the broad chemical classes of biological oligomers and polymers Amino acids that are part of a peptide or polypeptide chain are termed “residues” and can be consecutively numbered. All peptides except cyclic peptides have an N-terminal residue at one end and a C-terminal residue at the other end of the peptide. An oligopeptide consists of only a few amino acids (usually between two and twenty). A polypeptide is a longer, continuous, and unbranched peptide chain. Peptides are distinguished from proteins on the basis of size, and as an arbitrary benchmark can be understood to contain approximately 50 or fewer amino acids. Proteins consist of one or more polypeptides, usually arranged in a biologically functional way. While aspects of the lab techniques applied to peptides versus polypeptides and proteins differ (e.g., the specifics of electrophoresis, chromatography, etc.), the size boundaries that distinguish peptides from polypeptides and proteins are not absolute. Therefore, in the context of the present invention, the terms “peptide”, “polypeptide” and “protein” may be used interchangeably, and the term “polypeptide” is often preferred.

[0300] Polypeptides may further form multimers such as dimers, trimers and higher oligomers, which consist of more than one polypeptide molecule. Polypeptide molecules forming such dimers, trimers etc. may be identical or non-identical. The corresponding structures of higher order of such multimers are, consequently, termed homo- or heterodimers, homo- or heterotrimers etc. An example for a hereteromultimer is an antibody or immunoglobulin molecule, which, in its naturally occurring form, consists of two identical light polypeptide chains and two identical heavy polypeptide chains. The terms “peptide”, “polypeptide” and “protein” also refer to naturally modified peptides/polypeptides/proteins wherein the modification is accomplished e.g. by post-translational modifications like glycosylation, acetylation, phosphorylation and the like. A “peptide”, “polypeptide” or “protein” when referred to herein may also be chemically modified such as pegylated. Such modifications are well known in the art.

[0301] The antibody construct of the present invention is typically formulated in a pharmaceutical composition or a formulation. Materials of a pharmaceutical composition are usually formulated in concentrations that are acceptable for the site of administration. Formulations and compositions thus may be designed in accordance with the invention for delivery by any suitable route of administration.

[0302] As used herein, the term “pharmaceutical composition” relates to a composition which is suitable for administration to a patient, preferably a human patient. The particularly preferred pharmaceutical composition of this invention comprises one or a plurality of the antibody construct(s) of the invention, usually in a therapeutically effective amount. The pharmaceutical composition may further comprise suitable formulations of one or more (pharmaceutically effective) carriers, stabilizers, excipients, diluents, solubilizers, surfactants, emulsifiers, preservatives and/or adjuvants. Acceptable constituents of the composition are typically nontoxic to recipients at the dosages and concentrations employed. Pharmaceutical compositions of the invention include, but are not limited to, liquid, frozen, and lyophilized compositions. If the pharmaceutical composition has been lyophilized, the lyophilized material is reconstituted in an appropriate liquid prior to administration. The lyophilized material may e.g. be reconstituted in bacteriostatic water for injection (BWFI), physiological saline, phosphate buffered saline (PBS), or the same formulation the protein had been in prior to lyophilization.

[0303] The compositions may comprise a pharmaceutically acceptable carrier. In general, as used herein, “pharmaceutically acceptable carrier” means any and all aqueous and non-aqueous solutions, sterile solutions, solvents, buffers, e.g. phosphate buffered saline (PBS) solutions, water, suspensions, emulsions, such as oil/water emulsions, various types of wetting agents, liposomes, dispersion media and coatings, which are compatible with pharmaceutical administration, in particular with parenteral administration. The use of such media and agents in pharmaceutical compositions is well known in the art, and the compositions comprising such carriers can be formulated by well-known conventional methods.

[0304] Certain embodiments provide pharmaceutical compositions comprising the antibody construct of the invention and further one or more excipients. Excipients can be used for a wide variety of purposes, such as adjusting physical, chemical, or biological properties of formulations, such as adjustment of viscosity, and or processes of the invention to improve effectiveness and/or to stabilize such formulations and processes against degradation and spoilage e.g. due to stresses that occur during manufacturing, shipping, storage, pre-use preparation, administration, and thereafter. Excipients should in general be used in their lowest effective concentrations.

[0305] In certain embodiments, the pharmaceutical composition may also contain formulation materials/substances for the purpose of modifying, maintaining or preserving certain characteristics of the composition such as the pH, osmolarity, viscosity, clarity, color, isotonicity, odor, sterility, stability, rate of dissolution or release, adsorption or penetration (see, Remington's Pharmaceutical Sciences, 18^{th} Edition, 1990, Mack Publishing Company).

[0306] The present invention refers to the following items:

[0307] Item 1. An antibody construct comprising a first domain which binds to BCMA and a second domain which binds to CD3, for use in the treatment or amelioration of a BCMA positive neoplasm, wherein the antibody construct is administered at a dose of 6.5 μg/day up to 650 μg/day in at least one cycle, wherein one cycle comprises a period of administration of the antibody construct of at least seven consecutive days.

[0308] Item 2. The antibody construct according to item 1 which is administered for 2, 3, 4, 5, 6, 7, 8, 9 or 10 cycles.

[0309] Item 3. The antibody construct according to any one of the items 1 or 2, wherein one cycle comprises a period of administration of the antibody construct, followed by a period without administration of the antibody construct.

[0310] Item 4. The antibody construct according to any one of the preceding items, wherein the period of administration of the antibody construct is from one to eight weeks, preferably from two to six weeks, and more preferably from 25 to 30 days.

[0311] Item 5. The antibody construct according to item 3 or 4, wherein the period without administration of the antibody construct is at least seven consecutive days.

[0312] Item 6. The antibody construct according to any one of items 3 to 6, wherein the period without administration of the antibody construct is from one week to three months, preferably from one week to two months, and more preferably from one week to one month.

[0313] Item 7. The antibody construct according to any one of the preceding items, wherein the dose of the antibody construct is constant during each cycle.

[0314] Item 8. The antibody construct according to any one of the preceding items, wherein the dose of the antibody construct is constant during each cycle and from one cycle to the subsequent cycle.

[0315] Item 9. The antibody construct according to any one of the preceding items, which is administered parenterally, preferably intravenously, and more preferably via continuous intravenous administration.

[0316] Item 10. The antibody construct according to any one of the preceding items, wherein the BCMA positive neoplasm is selected from the group consisting of multiple myeloma, relapsed and/or refractory multiple myeloma, heavy chain multiple myeloma, light chain multiple myeloma, extramedullary myeloma, plasmacytoma, plasma cell leukemia, Waldenström's macroglobulinemia, and smoldering myeloma.

[0317] Item 11. The antibody construct according to any one of the preceding items, wherein
[0318] a) the antibody construct is a single chain polypeptide,
[0319] b) the first domain is in the format of an scFv,
[0320] c) the second domain is in the format of an scFv, and/or
[0321] d) the first domain and the second domain are connected via a linker, preferably a peptide linker, more preferably a glycine/serine linker.

[0322] Item 12. The antibody construct according to any one of the preceding items, which competes for binding to BCMA with or which binds to the same epitope of BCMA as:

[0323] a) an antibody or antibody construct comprising a domain which binds to BCMA on the surface of a target cell, wherein said domain comprises a VH region comprising CDR-H1 as depicted in SEQ ID NO: 171, CDR-H2 as depicted in SEQ ID NO: 172, and CDR-H3 as depicted in SEQ ID NO: 173, and a VL region comprising CDR-L1 as depicted in SEQ ID NO: 174, CDR-L2 as depicted in SEQ ID NO: 175, and CDR-L3 as depicted in SEQ ID NO: 176;

[0324] b) an antibody or antibody construct comprising a domain which binds to BCMA on the surface of a target cell, wherein said domain comprises a VH region as depicted in SEQ ID NO: 177, and a VL region as depicted in SEQ ID NO: 178;

[0325] c) an antibody construct comprising a domain which binds to BCMA on the surface of a target cell, wherein said domain comprises the amino acid sequence as depicted in SEQ ID NO: 179; or

[0326] d) an antibody construct having the amino acid sequence as depicted in SEQ ID NO: 661.

[0327] Item 13. The antibody construct according to any one of the preceding items, which competes for binding to CD3 with or which binds to the same epitope of CD3 as:

[0328] a) an antibody or antibody construct comprising a domain which binds to CD3 on the surface of a T cell, wherein said domain comprises a VH region comprising CDR-H1 as depicted in SEQ ID NO: 636, CDR-H2 as depicted in SEQ ID NO: 637, and CDR-H3 as depicted in SEQ ID NO: 638, and a VL region comprising CDR-L1 as depicted in SEQ ID NO: 633, CDR-L2 as depicted in SEQ ID NO: 634, CDR-L3 as depicted in SEQ ID NO: 635;

[0329] b) an antibody or antibody construct comprising a domain which binds to CD3 on the surface of a T cell, wherein said domain comprises a VH region as depicted in SEQ ID NO: 639, and a VL region as depicted in SEQ ID NO: 641;

[0330] c) an antibody construct comprising a domain which binds to CD3 on the surface of a T cell, wherein said domain comprises the amino acid sequence as depicted in SEQ ID NO: 642; or

[0331] d) an antibody construct having the amino acid sequence as depicted in SEQ ID NO: 661.

[0332] Item 14. The antibody construct according to any one of the preceding items, wherein the first domain which binds to BCMA comprises a VH region comprising CDR-H1, CDR-H2 and CDR-H3 and a VL region comprising CDR-L1, CDR-L2 and CDR-L3 selected from:
[0333] (1) CDR-H1 as depicted in SEQ ID NO: 1, CDR-H2 as depicted in SEQ ID NO: 2, CDR-H3 as depicted in SEQ ID NO: 3, CDR-L1 as depicted in SEQ ID NO: 4, CDR-L2 as depicted in SEQ ID NO: 5, and CDR-L3 as depicted in SEQ ID NO: 6;
[0334] (2) CDR-H1 as depicted in SEQ ID NO: 11, CDR-H2 as depicted in SEQ ID NO: 12, CDR-H3 as depicted in SEQ ID NO: 13, CDR-L1 as depicted in SEQ ID NO: 14, CDR-L2 as depicted in SEQ ID NO: 15, and CDR-L3 as depicted in SEQ ID NO: 16;
[0335] (3) CDR-H1 as depicted in SEQ ID NO: 21, CDR-H2 as depicted in SEQ ID NO: 22, CDR-H3 as depicted in SEQ ID NO: 23, CDR-L1 as depicted in SEQ ID NO: 24, CDR-L2 as depicted in SEQ ID NO: 25, and CDR-L3 as depicted in SEQ ID NO: 26;
[0336] (4) CDR-H1 as depicted in SEQ ID NO: 31, CDR-H2 as depicted in SEQ ID NO: 32, CDR-H3 as depicted in SEQ ID NO: 33, CDR-L1 as depicted in SEQ ID NO: 34, CDR-L2 as depicted in SEQ ID NO: 35, and CDR-L3 as depicted in SEQ ID NO: 36;
[0337] (5) CDR-H1 as depicted in SEQ ID NO: 41, CDR-H2 as depicted in SEQ ID NO: 42, CDR-H3 as depicted in SEQ ID NO: 43, CDR-L1 as depicted in SEQ ID NO: 44, CDR-L2 as depicted in SEQ ID NO: 45, and CDR-L3 as depicted in SEQ ID NO: 46;
[0338] (6) CDR-H1 as depicted in SEQ ID NO: 51, CDR-H2 as depicted in SEQ ID NO: 52, CDR-H3 as depicted in SEQ ID NO: 53, CDR-L1 as depicted in SEQ ID NO: 54, CDR-L2 as depicted in SEQ ID NO: 55, and CDR-L3 as depicted in SEQ ID NO: 56;
[0339] (7) CDR-H1 as depicted in SEQ ID NO: 61, CDR-H2 as depicted in SEQ ID NO: 62, CDR-H3 as depicted in SEQ ID NO: 63, CDR-L1 as depicted in SEQ ID NO: 64, CDR-L2 as depicted in SEQ ID NO: 65, and CDR-L3 as depicted in SEQ ID NO: 66;
[0340] (8) CDR-H1 as depicted in SEQ ID NO: 71, CDR-H2 as depicted in SEQ ID NO: 72, CDR-H3 as depicted in SEQ ID NO: 73, CDR-L1 as depicted in SEQ ID NO: 74, CDR-L2 as depicted in SEQ ID NO: 75, and CDR-L3 as depicted in SEQ ID NO: 76;
[0341] (9) CDR-H1 as depicted in SEQ ID NO: 81, CDR-H2 as depicted in SEQ ID NO: 82, CDR-H3 as depicted in SEQ ID NO: 83, CDR-L1 as depicted in SEQ ID NO: 84, CDR-L2 as depicted in SEQ ID NO: 85, and CDR-L3 as depicted in SEQ ID NO: 86;
[0342] (10) CDR-H1 as depicted in SEQ ID NO: 91, CDR-H2 as depicted in SEQ ID NO: 92, CDR-H3 as depicted in SEQ ID NO: 93, CDR-L1 as depicted in SEQ ID NO: 94, CDR-L2 as depicted in SEQ ID NO: 95, and CDR-L3 as depicted in SEQ ID NO: 96;
[0343] (11) CDR-H1 as depicted in SEQ ID NO: 101, CDR-H2 as depicted in SEQ ID NO: 102, CDR-H3 as depicted in SEQ ID NO: 103, CDR-L1 as depicted in SEQ ID NO: 104, CDR-L2 as depicted in SEQ ID NO: 105, and CDR-L3 as depicted in SEQ ID NO: 106;
[0344] (12) CDR-H1 as depicted in SEQ ID NO: 111, CDR-H2 as depicted in SEQ ID NO: 112, CDR-H3 as depicted in SEQ ID NO: 113, CDR-L1 as depicted in SEQ ID NO: 114, CDR-L2 as depicted in SEQ ID NO: 115, and CDR-L3 as depicted in SEQ ID NO: 116;
[0345] (13) CDR-H1 as depicted in SEQ ID NO: 121, CDR-H2 as depicted in SEQ ID NO: 122, CDR-H3 as depicted in SEQ ID NO: 123, CDR-L1 as depicted in SEQ ID NO: 124, CDR-L2 as depicted in SEQ ID NO: 125, and CDR-L3 as depicted in SEQ ID NO: 126;
[0346] (14) CDR-H1 as depicted in SEQ ID NO: 131, CDR-H2 as depicted in SEQ ID NO: 132, CDR-H3 as depicted in SEQ ID NO: 133, CDR-L1 as depicted in SEQ ID NO: 134, CDR-L2 as depicted in SEQ ID NO: 135, and CDR-L3 as depicted in SEQ ID NO: 136;
[0347] (15) CDR-H1 as depicted in SEQ ID NO: 141, CDR-H2 as depicted in SEQ ID NO: 142, CDR-H3 as depicted in SEQ ID NO: 143, CDR-L1 as depicted in SEQ ID NO: 144, CDR-L2 as depicted in SEQ ID NO: 145, and CDR-L3 as depicted in SEQ ID NO: 146;
[0348] (16) CDR-H1 as depicted in SEQ ID NO: 151, CDR-H2 as depicted in SEQ ID NO: 152, CDR-H3 as depicted in SEQ ID NO: 153, CDR-L1 as depicted in SEQ ID NO: 154, CDR-L2 as depicted in SEQ ID NO: 155, and CDR-L3 as depicted in SEQ ID NO: 156;
[0349] (17) CDR-H1 as depicted in SEQ ID NO: 161, CDR-H2 as depicted in SEQ ID NO: 162, CDR-H3 as depicted in SEQ ID NO: 163, CDR-L1 as depicted in SEQ ID NO: 164, CDR-L2 as depicted in SEQ ID NO: 165, and CDR-L3 as depicted in SEQ ID NO: 166;
[0350] (18) CDR-H1 as depicted in SEQ ID NO: 171, CDR-H2 as depicted in SEQ ID NO: 172, CDR-H3 as depicted in SEQ ID NO: 173, CDR-L1 as depicted in SEQ ID NO: 174, CDR-L2 as depicted in SEQ ID NO: 175, and CDR-L3 as depicted in SEQ ID NO: 176;
[0351] (19) CDR-H1 as depicted in SEQ ID NO: 181, CDR-H2 as depicted in SEQ ID NO: 182, CDR-H3 as depicted in SEQ ID NO: 183, CDR-L1 as depicted in SEQ ID NO: 184, CDR-L2 as depicted in SEQ ID NO: 185, and CDR-L3 as depicted in SEQ ID NO: 186;
[0352] (20) CDR-H1 as depicted in SEQ ID NO: 191, CDR-H2 as depicted in SEQ ID NO: 192, CDR-H3 as depicted in SEQ ID NO: 193, CDR-L1 as depicted in SEQ ID NO: 194, CDR-L2 as depicted in SEQ ID NO: 195, and CDR-L3 as depicted in SEQ ID NO: 196;
[0353] (21) CDR-H1 as depicted in SEQ ID NO: 201, CDR-H2 as depicted in SEQ ID NO: 202, CDR-H3 as depicted in SEQ ID NO: 203, CDR-L1 as depicted in SEQ ID NO: 204, CDR-L2 as depicted in SEQ ID NO: 205, and CDR-L3 as depicted in SEQ ID NO: 206;
[0354] (22) CDR-H1 as depicted in SEQ ID NO: 211, CDR-H2 as depicted in SEQ ID NO: 212, CDR-H3 as depicted in SEQ ID NO: 213, CDR-L1 as depicted in SEQ ID NO: 214, CDR-L2 as depicted in SEQ ID NO: 215, and CDR-L3 as depicted in SEQ ID NO: 216;
[0355] (23) CDR-H1 as depicted in SEQ ID NO: 221, CDR-H2 as depicted in SEQ ID NO: 222, CDR-H3 as depicted in SEQ ID NO: 223, CDR-L1 as depicted in SEQ ID NO: 224, CDR-L2 as depicted in SEQ ID NO: 225, and CDR-L3 as depicted in SEQ ID NO: 226;
[0356] (24) CDR-H1 as depicted in SEQ ID NO: 231, CDR-H2 as depicted in SEQ ID NO: 232, CDR-H3 as depicted in SEQ ID NO: 233, CDR-L1 as depicted in SEQ ID NO: 234, CDR-L2 as depicted in SEQ ID NO: 235, and CDR-L3 as depicted in SEQ ID NO: 236;
[0357] (25) CDR-H1 as depicted in SEQ ID NO: 241, CDR-H2 as depicted in SEQ ID NO: 242, CDR-H3 as depicted in SEQ ID NO: 243, CDR-L1 as depicted in SEQ ID NO: 244, CDR-L2 as depicted in SEQ ID NO: 245, and CDR-L3 as depicted in SEQ ID NO: 246;
[0358] (26) CDR-H1 as depicted in SEQ ID NO: 251, CDR-H2 as depicted in SEQ ID NO: 252, CDR-H3 as depicted in SEQ ID NO: 253, CDR-L1 as depicted in SEQ ID NO: 254, CDR-L2 as depicted in SEQ ID NO: 255, and CDR-L3 as depicted in SEQ ID NO: 256;
[0359] (27) CDR-H1 as depicted in SEQ ID NO: 261, CDR-H2 as depicted in SEQ ID NO: 262, CDR-H3 as depicted in SEQ ID NO: 263, CDR-L1 as depicted in SEQ ID NO: 264, CDR-L2 as depicted in SEQ ID NO: 265, and CDR-L3 as depicted in SEQ ID NO: 266;
[0360] (28) CDR-H1 as depicted in SEQ ID NO: 271, CDR-H2 as depicted in SEQ ID NO: 272, CDR-H3 as depicted in SEQ ID NO: 273, CDR-L1 as depicted in SEQ ID NO: 274, CDR-L2 as depicted in SEQ ID NO: 275, and CDR-L3 as depicted in SEQ ID NO: 276;
[0361] (29) CDR-H1 as depicted in SEQ ID NO: 281, CDR-H2 as depicted in SEQ ID NO: 282, CDR-H3 as depicted in SEQ ID NO: 283, CDR-L1 as depicted in SEQ ID NO: 284, CDR-L2 as depicted in SEQ ID NO: 285, and CDR-L3 as depicted in SEQ ID NO: 286;
[0362] (30) CDR-H1 as depicted in SEQ ID NO: 291, CDR-H2 as depicted in SEQ ID NO: 292, CDR-H3 as depicted in SEQ ID NO: 293, CDR-L1 as depicted in SEQ ID NO: 294, CDR-L2 as depicted in SEQ ID NO: 295, and CDR-L3 as depicted in SEQ ID NO: 296;
[0363] (31) CDR-H1 as depicted in SEQ ID NO: 301, CDR-H2 as depicted in SEQ ID NO: 302, CDR-H3 as depicted in SEQ ID NO: 303, CDR-L1 as depicted in SEQ ID NO: 304, CDR-L2 as depicted in SEQ ID NO: 305, and CDR-L3 as depicted in SEQ ID NO: 306;
[0364] (32) CDR-H1 as depicted in SEQ ID NO: 311, CDR-H2 as depicted in SEQ ID NO: 312, CDR-H3 as depicted in SEQ ID NO: 313, CDR-L1 as depicted in SEQ ID NO: 314, CDR-L2 as depicted in SEQ ID NO: 315, and CDR-L3 as depicted in SEQ ID NO: 316;
[0365] (33) CDR-H1 as depicted in SEQ ID NO: 321, CDR-H2 as depicted in SEQ ID NO: 322, CDR-H3 as depicted in SEQ ID NO: 323, CDR-L1 as depicted in SEQ ID NO: 324, CDR-L2 as depicted in SEQ ID NO: 325, and CDR-L3 as depicted in SEQ ID NO: 326;
[0366] (34) CDR-H1 as depicted in SEQ ID NO: 331, CDR-H2 as depicted in SEQ ID NO: 332, CDR-H3 as depicted in SEQ ID NO: 333, CDR-L1 as depicted in SEQ ID NO: 334, CDR-L2 as depicted in SEQ ID NO: 335, and CDR-L3 as depicted in SEQ ID NO: 336;
[0367] (35) CDR-H1 as depicted in SEQ ID NO: 341, CDR-H2 as depicted in SEQ ID NO: 342, CDR-H3 as depicted in SEQ ID NO: 343, CDR-L1 as depicted in SEQ ID NO: 344, CDR-L2 as depicted in SEQ ID NO: 345, and CDR-L3 as depicted in SEQ ID NO: 346;
[0368] (36) CDR-H1 as depicted in SEQ ID NO: 351, CDR-H2 as depicted in SEQ ID NO: 352, CDR-H3 as depicted in SEQ ID NO: 353, CDR-L1 as depicted in SEQ ID NO: 354, CDR-L2 as depicted in SEQ ID NO: 355, and CDR-L3 as depicted in SEQ ID NO: 356;
[0369] (37) CDR-H1 as depicted in SEQ ID NO: 361, CDR-H2 as depicted in SEQ ID NO: 362, CDR-H3 as depicted in SEQ ID NO: 363, CDR-L1 as depicted in SEQ ID NO: 364, CDR-L2 as depicted in SEQ ID NO: 365, and CDR-L3 as depicted in SEQ ID NO: 366;
[0370] (38) CDR-H1 as depicted in SEQ ID NO: 371, CDR-H2 as depicted in SEQ ID NO: 372, CDR-H3 as depicted in SEQ ID NO: 373, CDR-L1 as depicted in SEQ ID NO: 374, CDR-L2 as depicted in SEQ ID NO: 375, and CDR-L3 as depicted in SEQ ID NO: 376;
[0371] (39) CDR-H1 as depicted in SEQ ID NO: 381, CDR-H2 as depicted in SEQ ID NO: 382, CDR-H3 as depicted in SEQ ID NO: 383, CDR-L1 as depicted in SEQ ID NO: 384, CDR-L2 as depicted in SEQ ID NO: 385, and CDR-L3 as depicted in SEQ ID NO: 386;
[0372] (40) CDR-H1 as depicted in SEQ ID NO: 391, CDR-H2 as depicted in SEQ ID NO: 392, CDR-H3 as depicted in SEQ ID NO: 393, CDR-L1 as depicted in SEQ ID NO: 394, CDR-L2 as depicted in SEQ ID NO: 395, and CDR-L3 as depicted in SEQ ID NO: 396;
[0373] (41) CDR-H1 as depicted in SEQ ID NO: 401, CDR-H2 as depicted in SEQ ID NO: 402, CDR-H3 as depicted in SEQ ID NO: 403, CDR-L1 as depicted in SEQ ID NO: 404, CDR-L2 as depicted in SEQ ID NO: 405, and CDR-L3 as depicted in SEQ ID NO: 406;
[0374] (42) CDR-H1 as depicted in SEQ ID NO: 411, CDR-H2 as depicted in SEQ ID NO: 412, CDR-H3 as depicted in SEQ ID NO: 413, CDR-L1 as depicted in SEQ ID NO: 414, CDR-L2 as depicted in SEQ ID NO: 415, and CDR-L3 as depicted in SEQ ID NO: 416;
[0375] (43) CDR-H1 as depicted in SEQ ID NO: 421, CDR-H2 as depicted in SEQ ID NO: 422, CDR-H3 as depicted in SEQ ID NO: 423, CDR-L1 as depicted in SEQ ID NO: 424, CDR-L2 as depicted in SEQ ID NO: 425, and CDR-L3 as depicted in SEQ ID NO: 426;
[0376] (44) CDR-H1 as depicted in SEQ ID NO: 431, CDR-H2 as depicted in SEQ ID NO: 432, CDR-H3 as depicted in SEQ ID NO: 433, CDR-L1 as depicted in SEQ ID NO: 434, CDR-L2 as depicted in SEQ ID NO: 435, and CDR-L3 as depicted in SEQ ID NO: 436;
[0377] (45) CDR-H1 as depicted in SEQ ID NO: 441, CDR-H2 as depicted in SEQ ID NO: 442, CDR-H3 as depicted in SEQ ID NO: 443, CDR-L1 as depicted in SEQ ID NO: 444, CDR-L2 as depicted in SEQ ID NO: 445, and CDR-L3 as depicted in SEQ ID NO: 446;
[0378] (46) CDR-H1 as depicted in SEQ ID NO: 451, CDR-H2 as depicted in SEQ ID NO: 452, CDR-H3 as depicted in SEQ ID NO: 453, CDR-L1 as depicted in SEQ ID NO: 454, CDR-L2 as depicted in SEQ ID NO: 455, and CDR-L3 as depicted in SEQ ID NO: 456;
[0379] (47) CDR-H1 as depicted in SEQ ID NO: 461, CDR-H2 as depicted in SEQ ID NO: 462, CDR-H3 as depicted in SEQ ID NO: 463, CDR-L1 as depicted in SEQ ID NO: 464, CDR-L2 as depicted in SEQ ID NO: 465, and CDR-L3 as depicted in SEQ ID NO: 466;
[0380] (48) CDR-H1 as depicted in SEQ ID NO: 471, CDR-H2 as depicted in SEQ ID NO: 472, CDR-H3 as depicted in SEQ ID NO: 473, CDR-L1 as depicted in SEQ ID NO: 474, CDR-L2 as depicted in SEQ ID NO: 475, and CDR-L3 as depicted in SEQ ID NO: 476;
[0381] (49) CDR-H1 as depicted in SEQ ID NO: 481, CDR-H2 as depicted in SEQ ID NO: 482, CDR-H3 as depicted in SEQ ID NO: 483, CDR-L1 as depicted in SEQ ID NO: 484, CDR-L2 as depicted in SEQ ID NO: 485, and CDR-L3 as depicted in SEQ ID NO: 486;
[0382] (50) CDR-H1 as depicted in SEQ ID NO: 491, CDR-H2 as depicted in SEQ ID NO: 492, CDR-H3 as depicted in SEQ ID NO: 493, CDR-L1 as depicted in SEQ ID NO: 494, CDR-L2 as depicted in SEQ ID NO: 495, and CDR-L3 as depicted in SEQ ID NO: 496;
[0383] (51) CDR-H1 as depicted in SEQ ID NO: 501, CDR-H2 as depicted in SEQ ID NO: 502, CDR-H3 as depicted in SEQ ID NO: 503, CDR-L1 as depicted in SEQ ID NO: 504, CDR-L2 as depicted in SEQ ID NO: 505, and CDR-L3 as depicted in SEQ ID NO: 506;
[0384] (52) CDR-H1 as depicted in SEQ ID NO: 511, CDR-H2 as depicted in SEQ ID NO: 512, CDR-H3 as depicted in SEQ ID NO: 513, CDR-L1 as depicted in SEQ ID NO: 514, CDR-L2 as depicted in SEQ ID NO: 515, and CDR-L3 as depicted in SEQ ID NO: 516; and
[0385] (53) CDR-H1 as depicted in SEQ ID NO: 521, CDR-H2 as depicted in SEQ ID NO: 522, CDR-H3 as depicted in SEQ ID NO: 523, CDR-L1 as depicted in SEQ ID NO: 524, CDR-L2 as depicted in SEQ ID NO: 525, and CDR-L3 as depicted in SEQ ID NO: 526.

[0386] Item 15. The antibody construct according to any one of the preceding items, wherein the first domain which binds to BCMA comprises a VH region having an amino acid sequence selected from the group consisting of those depicted in SEQ ID NOs: 7, 17, 27, 37, 47, 57, 67, 77, 87, 97, 107, 117, 127, 137, 147, 157, 167, 177, 187, 197, 207, 217, 227, 237, 247, 257, 267, 277, 287, 307, 317, 327, 337, 347, 357, 367, 377, 387, 397, 407, 417, 427, 437, 447, 457, 467, 477, 487, 497, 507, 517, and 527.

[0387] Item 16. The antibody construct according to any one of the preceding items, wherein the first domain which binds to BCMA comprises a VL region having an amino acid sequence selected from the group consisting of those depicted in SEQ ID NOs: 8, 18, 28, 38, 48, 58, 68, 78, 88, 98, 108, 118, 128, 138, 148, 158, 168, 178, 188, 198, 208, 218, 228, 238, 248, 258, 268, 278, 288, 298, 308, 318, 328, 338, 348, 358, 368, 378, 388, 398, 408, 418, 428, 438, 448, 458, 468, 478, 488, 498, 508, 518, and 528.

[0388] Item 17. The antibody construct according to any one of the preceding items, wherein the first domain which binds to BCMA comprises a VH region and a VL region selected from the group consisting of:
[0389] (1) a VH region as depicted in SEQ ID NO: 7 and a VL region as depicted in SEQ ID NO: 8;
[0390] (2) a VH region as depicted in SEQ ID NO: 17 and a VL region as depicted in SEQ ID NO: 18;
[0391] (3) a VH region as depicted in SEQ ID NO: 27 and a VL region as depicted in SEQ ID NO: 28;
[0392] (4) a VH region as depicted in SEQ ID NO: 37 and a VL region as depicted in SEQ ID NO: 38;
[0393] (5) a VH region as depicted in SEQ ID NO: 47 and a VL region as depicted in SEQ ID NO: 48;
[0394] (6) a VH region as depicted in SEQ ID NO: 57 and a VL region as depicted in SEQ ID NO: 58;
[0395] (7) a VH region as depicted in SEQ ID NO: 67 and a VL region as depicted in SEQ ID NO: 68;
[0396] (8) a VH region as depicted in SEQ ID NO: 77 and a VL region as depicted in SEQ ID NO: 78;
[0397] (9) a VH region as depicted in SEQ ID NO: 87 and a VL region as depicted in SEQ ID NO: 88;
[0398] (10) a VH region as depicted in SEQ ID NO: 97 and a VL region as depicted in SEQ ID NO: 98;
[0399] (11) a VH region as depicted in SEQ ID NO: 107 and a VL region as depicted in SEQ ID NO: 108;
[0400] (12) a VH region as depicted in SEQ ID NO: 117 and a VL region as depicted in SEQ ID NO: 118;
[0401] (13) a VH region as depicted in SEQ ID NO: 127 and a VL region as depicted in SEQ ID NO: 128;
[0402] (14) a VH region as depicted in SEQ ID NO: 137 and a VL region as depicted in SEQ ID NO: 138;
[0403] (15) a VH region as depicted in SEQ ID NO: 147 and a VL region as depicted in SEQ ID NO: 148;
[0404] (16) a VH region as depicted in SEQ ID NO: 157 and a VL region as depicted in SEQ ID NO: 158;
[0405] (17) a VH region as depicted in SEQ ID NO: 167 and a VL region as depicted in SEQ ID NO: 168;
[0406] (18) a VH region as depicted in SEQ ID NO: 177 and a VL region as depicted in SEQ ID NO: 178;
[0407] (19) a VH region as depicted in SEQ ID NO: 187 and a VL region as depicted in SEQ ID NO: 188;
[0408] (20) a VH region as depicted in SEQ ID NO: 197 and a VL region as depicted in SEQ ID NO: 198;
[0409] (21) a VH region as depicted in SEQ ID NO: 207 and a VL region as depicted in SEQ ID NO: 208;
[0410] (22) a VH region as depicted in SEQ ID NO: 217 and a VL region as depicted in SEQ ID NO: 218;
[0411] (23) a VH region as depicted in SEQ ID NO: 227 and a VL region as depicted in SEQ ID NO: 228;
[0412] (24) a VH region as depicted in SEQ ID NO: 237 and a VL region as depicted in SEQ ID NO: 238;
[0413] (25) a VH region as depicted in SEQ ID NO: 247 and a VL region as depicted in SEQ ID NO: 248;
[0414] (26) a VH region as depicted in SEQ ID NO: 257 and a VL region as depicted in SEQ ID NO: 258;
[0415] (27) a VH region as depicted in SEQ ID NO: 267 and a VL region as depicted in SEQ ID NO: 268;
[0416] (28) a VH region as depicted in SEQ ID NO: 277 and a VL region as depicted in SEQ ID NO: 278;
[0417] (29) a VH region as depicted in SEQ ID NO: 287 and a VL region as depicted in SEQ ID NO: 288;
[0418] (30) a VH region as depicted in SEQ ID NO: 297 and a VL region as depicted in SEQ ID NO: 298;
[0419] (31) a VH region as depicted in SEQ ID NO: 307 and a VL region as depicted in SEQ ID NO: 308;
[0420] (32) a VH region as depicted in SEQ ID NO: 317 and a VL region as depicted in SEQ ID NO: 318;
[0421] (33) a VH region as depicted in SEQ ID NO: 327 and a VL region as depicted in SEQ ID NO: 328;
[0422] (34) a VH region as depicted in SEQ ID NO: 337 and a VL region as depicted in SEQ ID NO: 338;
[0423] (35) a VH region as depicted in SEQ ID NO: 347 and a VL region as depicted in SEQ ID NO: 348;
[0424] (36) a VH region as depicted in SEQ ID NO: 357 and a VL region as depicted in SEQ ID NO: 358;
[0425] (37) a VH region as depicted in SEQ ID NO: 367 and a VL region as depicted in SEQ ID NO: 368;
[0426] (38) a VH region as depicted in SEQ ID NO: 377 and a VL region as depicted in SEQ ID NO: 378;
[0427] (39) a VH region as depicted in SEQ ID NO: 387 and a VL region as depicted in SEQ ID NO: 388;
[0428] (40) a VH region as depicted in SEQ ID NO: 397 and a VL region as depicted in SEQ ID NO: 398;
[0429] (41) a VH region as depicted in SEQ ID NO: 407 and a VL region as depicted in SEQ ID NO: 408;
[0430] (42) a VH region as depicted in SEQ ID NO: 417 and a VL region as depicted in SEQ ID NO: 418;
[0431] (43) a VH region as depicted in SEQ ID NO: 427 and a VL region as depicted in SEQ ID NO: 428;
[0432] (44) a VH region as depicted in SEQ ID NO: 437 and a VL region as depicted in SEQ ID NO: 438;
[0433] (45) a VH region as depicted in SEQ ID NO: 447 and a VL region as depicted in SEQ ID NO: 448;
[0434] (46) a VH region as depicted in SEQ ID NO: 457 and a VL region as depicted in SEQ ID NO: 458;
[0435] (47) a VH region as depicted in SEQ ID NO: 467 and a VL region as depicted in SEQ ID NO: 468;
[0436] (48) a VH region as depicted in SEQ ID NO: 477 and a VL region as depicted in SEQ ID NO: 478;
[0437] (49) a VH region as depicted in SEQ ID NO: 487 and a VL region as depicted in SEQ ID NO: 488;
[0438] (50) a VH region as depicted in SEQ ID NO: 497 and a VL region as depicted in SEQ ID NO: 498;
[0439] (51) a VH region as depicted in SEQ ID NO: 507 and a VL region as depicted in SEQ ID NO: 508;
[0440] (52) a VH region as depicted in SEQ ID NO: 517 and a VL region as depicted in SEQ ID NO: 518; and
[0441] (53) a VH region as depicted in SEQ ID NO: 527 and a VL region as depicted in SEQ ID NO: 528.

[0442] Item 18. The antibody construct according to any one of the preceding items, wherein the first domain which binds to BCMA comprises or consists of a polypeptide having an amino acid sequence selected from the group consisting of SEQ ID NOs: 9, 19, 29, 39, 49, 59, 69, 79, 89, 109, 129, 139, 149, 159, 169, 179, 189, 199, 209, 219, 229, 239, 249, 259, 269, 279, 289, 299, 309, 319, 329, 339, 349, 359, 369, 379, 389, 399, 409, 419, 429, 439, 449, 459, 469, 479, 489, 499, 519, and 529.

[0443] Item 19. The antibody construct according to any one of the preceding items, wherein the second domain which binds to CD3 comprises a VL region comprising CDR-L1, CDR-L2 and CDR-L3 selected from the group consisting of:
[0444] (a) CDR-L1 as depicted in SEQ ID NO: 542, CDR-L2 as depicted in SEQ ID NO: 543, and CDR-L3 as depicted in SEQ ID NO: 544;
[0445] (b) CDR-L1 as depicted in SEQ ID NO: 599, CDR-L2 as depicted in SEQ ID NO: 600, and CDR-L3 as depicted in SEQ ID NO: 601; and
[0446] (c) CDR-L1 as depicted in SEQ ID NO: 621, CDR-L2 as depicted in SEQ ID NO: 622, and CDR-L3 as depicted in SEQ ID NO: 623.

[0447] Item 20. The antibody construct according to any one of the preceding items, wherein the second domain which binds to CD3 comprises a VH region comprising CDR-H1, CDR-H2 and CDR-H3 selected from the group consisting of:
[0448] (a) CDR-H1 as depicted in SEQ ID NO: 534, CDR-H2 as depicted in SEQ ID NO: 535, and CDR-H3 as depicted in SEQ ID NO: 536;
[0449] (b) CDR-H1 as depicted in SEQ ID NO: 545, CDR-H2 as depicted in SEQ ID NO: 546, and CDR-H3 as depicted in SEQ ID NO: 547;
[0450] (c) CDR-H1 as depicted in SEQ ID NO: 557, CDR-H2 as depicted in SEQ ID NO: 558, and CDR-H3 as depicted in SEQ ID NO: 559;
[0451] (d) CDR-H1 as depicted in SEQ ID NO: 568, CDR-H2 as depicted in SEQ ID NO: 569, and CDR-H3 as depicted in SEQ ID NO: 570;
[0452] (e) CDR-H1 as depicted in SEQ ID NO: 579, CDR-H2 as depicted in SEQ ID NO: 580, and CDR-H3 as depicted in SEQ ID NO: 581;
[0453] (f) CDR-H1 as depicted in SEQ ID NO: 591, CDR-H2 as depicted in SEQ ID NO: 592, and CDR-H3 as depicted in SEQ ID NO: 593;
[0454] (g) CDR-H1 as depicted in SEQ ID NO: 602, CDR-H2 as depicted in SEQ ID NO: 603, and CDR-H3 as depicted in SEQ ID NO: 604;
[0455] (h) CDR-H1 as depicted in SEQ ID NO: 613, CDR-H2 as depicted in SEQ ID NO: 614, and CDR-H3 as depicted in SEQ ID NO: 615;
[0456] (i) CDR-H1 as depicted in SEQ ID NO: 624, CDR-H2 as depicted in SEQ ID NO: 625, and CDR-H3 as depicted in SEQ ID NO: 626; and
[0457] (j) CDR-H1 as depicted in SEQ ID NO: 636, CDR-H2 as depicted in SEQ ID NO: 637, and CDR-H3 as depicted in SEQ ID NO: 638.

[0458] Item 21. The antibody construct according to any one of the preceding items, wherein the second domain which binds to CD3 comprises a VL region comprising CDR-L1, CDR-L2 and CDR-L3 and a VH region comprising CDR-H1, CDR-H2 and CDR-H3 selected from the group consisting of:
[0459] (a) CDR-L1 as depicted in SEQ ID NO: 531, CDR-L2 as depicted in SEQ ID NO: 532, CDR-L3 as depicted in SEQ ID NO: 533, CDR-H1 as depicted in SEQ ID NO: 534, CDR-H2 as depicted in SEQ ID NO: 535, and CDR-H3 as depicted in SEQ ID NO: 536;
[0460] (b) CDR-L1 as depicted in SEQ ID NO: 542, CDR-L2 as depicted in SEQ ID NO: 543, CDR-L3 as depicted in SEQ ID NO: 544, CDR-H1 as depicted in SEQ ID NO: 545, CDR-H2 as depicted in SEQ ID NO: 546, and CDR-H3 as depicted in SEQ ID NO: 547;
[0461] (c) CDR-L1 as depicted in SEQ ID NO: 554, CDR-L2 as depicted in SEQ ID NO: 555, CDR-L3 as depicted in SEQ ID NO: 556, CDR-H1 as depicted in SEQ ID NO: 557, CDR-H2 as depicted in SEQ ID NO: 558, and CDR-H3 as depicted in SEQ ID NO: 559;
[0462] (d) CDR-L1 as depicted in SEQ ID NO: 565, CDR-L2 as depicted in SEQ ID NO: 566, CDR-L3 as depicted in SEQ ID NO: 567, CDR-H1 as depicted in SEQ ID NO: 568, CDR-H2 as depicted in SEQ ID NO: 569, and CDR-H3 as depicted in SEQ ID NO: 570;
[0463] (e) CDR-L1 as depicted in SEQ ID NO: 576, CDR-L2 as depicted in SEQ ID NO: 577, CDR-L3 as depicted in SEQ ID NO: 578, CDR-H1 as depicted in SEQ ID NO: 579, CDR-H2 as depicted in SEQ ID NO: 580, and CDR-H3 as depicted in SEQ ID NO: 581;
[0464] (f) CDR-L1 as depicted in SEQ ID NO: 588, CDR-L2 as depicted in SEQ ID NO: 589, CDR-L3 as depicted in SEQ ID NO: 590, CDR-H1 as depicted in SEQ ID NO: 591, CDR-H2 as depicted in SEQ ID NO: 592, and CDR-H3 as depicted in SEQ ID NO: 593;
[0465] (g) CDR-L1 as depicted in SEQ ID NO: 599, CDR-L2 as depicted in SEQ ID NO: 600, CDR-L3 as depicted in SEQ ID NO: 601, CDR-H1 as depicted in SEQ ID NO: 602, CDR-H2 as depicted in SEQ ID NO: 603, and CDR-H3 as depicted in SEQ ID NO: 604;
[0466] (h) CDR-L1 as depicted in SEQ ID NO: 610, CDR-L2 as depicted in SEQ ID NO: 611, CDR-L3 as depicted in SEQ ID NO: 612, CDR-H1 as depicted in SEQ ID NO: 613, CDR-H2 as depicted in SEQ ID NO: 614, and CDR-H3 as depicted in SEQ ID NO: 615;
[0467] (i) CDR-L1 as depicted in SEQ ID NO: 621, CDR-L2 as depicted in SEQ ID NO: 622, CDR-L3 as depicted in SEQ ID NO: 623, CDR-H1 as depicted in SEQ ID NO: 624, CDR-H2 as depicted in SEQ ID NO: 625, and CDR-H3 as depicted in SEQ ID NO: 626; and
[0468] (j) CDR-L1 as depicted in SEQ ID NO: 633, CDR-L2 as depicted in SEQ ID NO: 634, CDR-L3 as depicted in SEQ ID NO: 635, CDR-H1 as depicted in SEQ ID NO: 636, CDR-H2 as depicted in SEQ ID NO: 637, and CDR-H3 as depicted in SEQ ID NO: 638.

[0469] Item 22. The antibody construct according to any one of the preceding items, wherein the second domain which binds to CD3 comprises a VL region having an amino acid sequence selected from the group consisting of those depicted in SEQ ID NO: 550, SEQ ID NO: 551, SEQ ID NO: 584, SEQ ID NO: 585, SEQ ID NO: 629 and SEQ ID NO: 630.

[0470] Item 23. The antibody construct according to any one of the preceding items, wherein the second domain which binds to CD3 comprises a VH region having an amino acid sequence selected from the group consisting of those depicted in SEQ ID NO: 537, SEQ ID NO: 538, SEQ ID NO: 548, SEQ ID NO: 549, SEQ ID NO: 560, SEQ ID NO: 561, SEQ ID NO: 571, SEQ ID NO: 572, SEQ ID NO: 582, SEQ ID NO: 583, SEQ ID NO: 594, SEQ ID NO: 595, SEQ ID NO: 605, SEQ ID NO: 606, SEQ ID NO: 616, SEQ ID NO: 617, SEQ ID NO: 627, SEQ ID NO: 628, SEQ ID NO: 639, SEQ ID NO: 640, and SEQ ID NO: 644.

[0471] Item 24. The antibody construct according to any one of the preceding items, wherein the second domain which binds to CD3 comprises a VL region and a VH region selected from the group consisting of:
[0472] (a) a VL region as depicted in SEQ ID NO: 539 or 521 and a VH region as depicted in SEQ ID NO: 537 or 538;
[0473] (b) a VL region as depicted in SEQ ID NO: 550 or 521 and a VH region as depicted in SEQ ID NO: 548 or 549;
[0474] (c) a VL region as depicted in SEQ ID NO: 562 or 521 and a VH region as depicted in SEQ ID NO: 560 or 561;
[0475] (d) a VL region as depicted in SEQ ID NO: 573 or 521 and a VH region as depicted in SEQ ID NO: 571 or 572;
[0476] (e) a VL region as depicted in SEQ ID NO: 584 or 585 and a VH region as depicted in SEQ ID NO: 582 or 583;
[0477] (f) a VL region as depicted in SEQ ID NO: 596 or 521 and a VH region as depicted in SEQ ID NO: 594 or 595;
[0478] (g) a VL region as depicted in SEQ ID NO: 607 or 585 and a VH region as depicted in SEQ ID NO: 605 or 606;
[0479] (h) a VL region as depicted in SEQ ID NO: 618 or 521 and a VH region as depicted in SEQ ID NO: 616 or 617;
[0480] (i) a VL region as depicted in SEQ ID NO: 629 or 630 and a VH region as depicted in SEQ ID NO: 627 or 628;
[0481] (j) a VL region as depicted in SEQ ID NO: 641 or 630 and a VH region as depicted in SEQ ID NO: 639 or 640; and
[0482] (k) a VL region as depicted in SEQ ID NO: 645 and a VH region as depicted in SEQ ID NO: 644.

[0483] Item 25. The antibody construct according to any one of the preceding items, wherein the second domain which binds to CD3 comprises or consists of a polypeptide having an amino acid sequence selected from the group consisting of those depicted in SEQ ID NOs: 540, 541, 552, 553, 563, 564, 574, 575, 586, 587, 597, 598, 608, 609, 619, 620, 631, 632, 642, 643, and 646.

[0484] Item 26. The antibody construct according to any one of the preceding items, which comprises a polypeptide having an amino acid sequence selected from the group consisting of those depicted in SEQ ID NOs: 10, 20, 30, 40, 50, 60, 70, 80, 90, 100, 110, 120, 130, 140, 150, 160, 170, 180, 190, 200, 210, 220, 230, 240, 250, 260, 270, 280, 290, 300, 310, 320, 330, 340, 350, 360, 370, 380, 390, 400, 410, 420, 430, 440, 450, 460, 470, 480, 490, 500, 510, 520, 530 and 661.

[0485] Item 27. The antibody construct according to any one of the preceding items, which has a molecular weight of about 20 to about 90 kDa, about 30 to about 80 kDa, about 40 to about 70 kDa, about 50 to about 60 kDa, about 52 to about 58 kDa, and preferably about 54 to about 56 kDa.

[0486] Item 28. The antibody construct according to any one of the preceding items, which has an elimination half-life (T_{1/2}) of about 3-36 h, about 6-30 h, or about 12-24 h.

[0487] As used herein, the singular forms “a”, “an”, and “the” include plural references unless the context clearly indicates otherwise. Thus, for example, reference to “a reagent” includes one or more of such different reagents and reference to “the method” includes reference to equivalent steps and methods known to those of ordinary skill in the art that could be modified or substituted for the methods described herein.

[0488] Unless otherwise indicated, the term “at least” preceding a series of elements is to be understood to refer to every element in the series. Those skilled in the art will recognize, or be able to ascertain using no more than routine experimentation, many equivalents to the specific embodiments of the invention described herein. Such equivalents are intended to be encompassed by the present invention.

[0489] The term “and/or” wherever used herein includes the meaning of “and”, “or” and “all or any other combination of the elements connected by said term”.

[0490] The term “about” or “approximately” as used herein means within ±20%, preferably within ±15%, more preferably within ±10%, and most preferably within ±5% of a given value or range. It also includes the concrete value, e.g., “about 50” includes the value “50”.

[0491] Throughout this specification and the claims, unless the context requires otherwise, the word “comprise”, and variations such as “comprises” and “comprising”, will be understood to imply the inclusion of a stated integer or step or group of integers or steps but not the exclusion of any other integer or step or group of integer or step. When used herein the term “comprising” can be substituted with the term “containing” or “including” or sometimes when used herein with the term “having”.

[0492] When used herein “consisting of” excludes any element, step, or ingredient not specified in the claim element. When used herein, “consisting essentially of” does not exclude materials or steps that do not materially affect the basic and novel characteristics of the claim.

[0493] In each instance herein, any of the terms “comprising”, “consisting essentially of” and “consisting of” may be replaced with either of the other two terms.

[0494] It should be understood that the above description and the below examples provide exemplary arrangements, but the present invention is not limited to the particular methodologies, techniques, protocols, material, reagents, substances, etc., described herein and as such can vary. The terminology used herein is for the purpose of describing particular embodiments only, and is not intended to limit the scope of the present invention, which is defined solely by the claims. Aspects of the invention are provided in the independent claims. Some optional features of the invention are provided in the dependent claims.

[0495] All publications and patents cited throughout the text of this specification (including all patents, patent applications, scientific publications, manufacturer's specifications, instructions, etc.), whether supra or infra, are hereby incorporated by reference in their entirety. Nothing herein is to be construed as an admission that the invention is not entitled to antedate such disclosure by virtue of prior invention. To the extent the material incorporated by reference contradicts or is inconsistent with this specification, the specification will supersede any such material.

[0496] A better understanding of the present invention and of its advantages will be obtained from the following examples, offered for illustrative purposes only. The examples are not intended and should not be construed as to limit the scope of the present invention in any way.

### EXAMPLES

### 1. Clinical Trial Study Protocol

[0497] AMG 420 was dosed as a continuous IV (cIV) infusion for four weeks, followed by a treatment holiday of two weeks, in escalating dose levels ranging from 0.2 μg/d to 800 μg/d. Single-patient cohorts (0.2 μg/day-0.4 μg/day-0.8 μg/day-1.6 μg/day) were followed by cohorts of 3-6 patients (3.2 μg/day-6.5 μg/day-13 μg/day-25 μg/day-50 μg/day-100 μg/day-200 μg/day-400 μg/day-800 μg/day). In total, 13 dose cohorts were completed. Treatment continued for up to five 4-weeks-on/2-weeks-off cycles; and 5 additional cycles were given in case of perceived clinical benefit. Eligible patients were ≥18 years old and had relapsed/refractory MM and progression after more than two prior treatment lines (including both ≥1 proteasome inhibitor and ≥1 immunomodulatory drug=IMiD). MRD response was defined for this study as <1 tumor cell/10⁴ normal cells in the bone marrow per FACS using antibodies to cytIgλ, cytIgκ, CD19, CD56 or CD138, CD38, and CD45.

### 2. Results

[0498] 35 patients received AMG 420 (0.2-800 μg/d). Mean (SD) age was 63.8 (8.7) years, median age was 65 years, and min-max age was 39-79 years. 22 (63%) of the patients were male. Two patients completed 10 cycles. The 35 patients were treated for a mean (SD) of 2.3 (2.3) cycles and a median (min-max) of 1 (1-10) cycles. The treatment responders (n=8) were treated for a mean (SD) of 6.8 (4.5) cycles and a median (min-max) of 3.5 (2-10) cycles.

[0499] No anti-AMG 420 antibodies were detected up to and including 800 μg/day, and no dose-limiting toxicities (DLTs) were observed up to 400 μg/d. Two out of three patients having received 800 μg/day AMG 420 experienced DLTs: One patient having grade 3 cytokine release syndrome (CRS) within 1 day of initiating treatment with fever, hypertension, tachycardia, and retrograde amnesia (the symptoms resolved after stopping the drug); and one patient having grade 3 polyneuropathy (PPN) that required hospitalization with subsequent complete recovery. In the latter case, M protein decreased by 60% after 15 days of treatment.

[0500] Six patients had complete responses (CRs) as assessed using IMWG response criteria: one patient each at 6.5 μg/day, 100 μg/day, and 200 μg/day, and tree patients at 400 μg/d; the responses were ongoing for these last three patients (≥4.6 months). There also were two partial remissions: one partial response (PR) at 50 μg/d and a very good partial response (VGPR) at 800 μg/d. Response duration was for up to 8 cycles; 1 patient had a partial response during cycles 3-10. Four out of the six subjects with CR were MRD negative: one patient at 200 μg/day and all three patients at 400 μg/d. In an additional dose confirmation cohort (400 μg/day), two out of three patients had PRs as of cycle 1. Thus, at the dose of 400 μg/d, the objective response rate (ORR) was 5/6; and all 5 patients were responding on treatment during a period of at least two months (treatment ongoing) and up to 7 months or longer (treatment ongoing).

[0501] Following cIV infusion of AMG 420, free steady-state concentrations (Css) were reached in approximately 2 days and remained stable over the infusion period. Mean free AMG 420 Css values generally increased with increasing AMG 420 dose.

### 3. Updated Results

[0502] The following result update includes the above described results (item 2) and adds information on further patients treated with AMG 420 as described in the clinical trial study protocol (item 1). Forty-two patients received AMG 420 at 0.2-800 μg/day. Median age was 65 years and median disease duration 5.2 years. 64% of the patients were male. Patients were treated for a median (range) of 1 (1-10) cycles; responders were treated for a median (range) of 7 (1-10) cycles. Eight patients completed 5 cycles, and subsequently either completed 10 cycles (n=3), discontinued (n=3), or are still on treatment (n=2). No anti-AMG 420 antibodies were detected in any patient.

[0503] CR, PR and VGPR were assessed using IMWG response criteria. During dose escalation, responses were evident starting at 6.5 μg/day (one CR at this dose level). There was one PR at 50 μg/day, a CR at 100 μg/day, and an MRD-negative CR at 200 μg/day. At 400 μg/day, the response rate was 70% (7/10), including five MRD-negative CRs (50%), one VGPR, and one PR. Thus, at the dose of 400 μg/day, the objective response rate (ORR) was 7/10 (70%). All seven patients responded in the first cycle, some responses lasted >1 year. Responses at this dose lasted for at least a median of 9.0 months (range, 5.8-13.6+ months), with two patients ongoing on treatment. Overall, at data cutoff, six patients had MRD-negative CRs (one at 200 μg/day, five at 400 μg/day), with an additional three CRs (at 6.5, 100, and 800 μg/day), two VGPRs (at 400 and 800 μg/day), and two PRs (at 50 and 400 μg/day). The median time to any response was 1 month, with 11 of 13 responding patients (ie, all responders receiving ≥100 μg/day) responding in the first cycle. Best responses occurred during cycle 1 (n=4), cycle 2 (n=2), cycle 3 (n=5), or in follow-up (n=2). Responses lasted for at least a median of 8.4 months (range, 2.5-15.5 months) and were over a year in three patients; responses were ongoing at last observation for 7/13 patients. For the three patients with post-treatment data, their ongoing responses lasted for up to 11 months after treatment as of last observation; in one case a patient discontinuing treatment after 2 weeks for polyneuropathy had CR nearly 9 months later. MRD-negative responses lasted for a median of 9.6 months (range, 2.8-12.8 months). Responses were seen in patients with all cytogenetic risk categories, including 5/13 responders having high-risk cytogenetics.

[0504] In this study, 800 μg/day was considered not tolerable due to grade 3 cytokine release syndrome and grade 3 polyneuropathy, both resolved. These DLTs were seen in two of three patients at 800 μg/day.

[0505] Examination of baseline cell surface BCMA expression found that BCMA was expressed on myeloma cells in all patients, with no difference in expression levels by response status. There also was no difference between responders and non-responders for percentage of plasma cells in the bone marrow that were BCMA positive or for percentage of myeloma cells in the bone marrow at baseline.

[0506] The IMWG response criteria for a complete response (see also http://imwg.myeloma.org/intemational-myeloma-working-group-imwg-uniform-response-criteria-for-multiple-myeloma/) are:
[0507] Negative M protein immunofixation on the serum and urine,
[0508] Disappearance of any soft tissue plasmacytomas, and
[0509] <5% plasma cells in bone marrow

[0510] The IMWG response criteria for a partial response are:
[0511] M protein electrophoresis: ≥50% reduction of serum M-protein and reduction in 24 hours urinary M-protein by ≥90% or to <200 mg/24 h
[0512] Free light chains (FLC): If the serum and urine M protein are unmeasurable, a ≥50% decrease in the difference between involved and uninvolved FLC levels is required in place of the M-protein criteria
[0513] If serum and urine M protein are not measurable, and serum free light assay is also not measurable: ≥50% reduction in plasma cells is required in place of M protein, provided baseline bone marrow plasma cell percentage was ≥30%
[0514] In addition to the above listed criteria, if present at baseline, a ≥50% reduction in the size of soft tissue plasmacytomas is also required

[0515] The IMWG response criteria for a very good partial response are:
[0516] Serum and urine M protein detectable by immunofixation but not on electrophoresis or ≥90% reduction in serum M-protein plus urine M-protein level <100 mg/24 h

1. A method of treating or ameliorating a B cell maturation antigen (BCMA) positive neoplasm comprising administering an antibody construct comprising a first domain which binds to BCMA and a second domain which binds to CD3, wherein the antibody construct is administered at a dose of 6.5 μg/day up to 650 μg/day in at least one cycle, wherein one cycle comprises a period of administration of the antibody construct of at least seven consecutive days.

2. The method of claim 1, wherein the antibody construct is administered for 2, 3, 4, 5, 6, 7, 8, 9 or 10 cycles.

3. The method of claim 1, wherein one cycle comprises a period of administration of the antibody construct, followed by a period without administration of the antibody construct.

4. The method of claim 1, wherein the period of administration of the antibody construct is from one to eight weeks, preferably from two to six weeks, and more preferably from 25 to 30 days.

5. The method of claim 3, wherein the period without administration of the antibody construct is at least seven consecutive days.

6. The method of claim 3, wherein the period without administration of the antibody construct is from one week to three months, preferably from one week to two months, and more preferably from one week to one month.

7. The method of claim 1, wherein the dose of the antibody construct is constant during each cycle.

8. The method of claim 1, wherein the dose of the antibody construct is constant during each cycle and from one cycle to the subsequent cycle.

9. The method of claim 1, which is administered parenterally, preferably intravenously, and more preferably via continuous intravenous administration.

10. The method of claim 1, wherein the BCMA positive neoplasm is selected from the group consisting of multiple myeloma, relapsed and/or refractory multiple myeloma, heavy chain multiple myeloma, light chain multiple myeloma, extramedullary myeloma, plasmacytoma, plasma cell leukemia, Waldenström's macroglobulinemia, and smoldering myeloma.

11. The method of claim 1, wherein
a) the antibody construct is a single chain polypeptide,
b) the first domain is in the format of an scFv,
c) the second domain is in the format of an scFv, and/or
d) the first domain and the second domain are connected via a linker, preferably a peptide linker, more preferably a glycine/serine linker.

12. The method of claim 1, which competes for binding to BCMA with or which binds to the same epitope of BCMA as:
a) an antibody or antibody construct comprising a domain which binds to BCMA on the surface of a target cell, wherein said domain comprises a VH region comprising CDR-H1 as depicted in SEQ ID NO: 171, CDR-H2 as depicted in SEQ ID NO: 172, and CDR-H3 as depicted in SEQ ID NO: 173, and a VL region comprising CDR-L1 as depicted in SEQ ID NO: 174, CDR-L2 as depicted in SEQ ID NO: 175, and CDR-L3 as depicted in SEQ ID NO: 176;
b) an antibody or antibody construct comprising a domain which binds to BCMA on the surface of a target cell, wherein said domain comprises a VH region as depicted in SEQ ID NO: 177, and a VL region as depicted in SEQ ID NO: 178;
c) an antibody construct comprising a domain which binds to BCMA on the surface of a target cell, wherein said domain comprises the amino acid sequence as depicted in SEQ ID NO: 179; or
d) an antibody construct comprising the amino acid sequence as depicted in SEQ ID NO: 661.

13. The method of claim 1, which competes for binding to CD3 with or which binds to the same epitope of CD3 as:
a) an antibody or antibody construct comprising a domain which binds to CD3 on the surface of a T cell, wherein said domain comprises a VH region comprising CDR-H1 as depicted in SEQ ID NO: 636, CDR-H2 as depicted in SEQ ID NO: 637, and CDR-H3 as depicted in SEQ ID NO: 638, and a VL region comprising CDR-L1 as depicted in SEQ ID NO: 633, CDR-L2 as depicted in SEQ ID NO: 634, CDR-L3 as depicted in SEQ ID NO: 635;
b) an antibody or antibody construct comprising a domain which binds to CD3 on the surface of a T cell, wherein said domain comprises a VH region as depicted in SEQ ID NO: 639, and a VL region as depicted in SEQ ID NO: 641;
c) an antibody construct comprising a domain which binds to CD3 on the surface of a T cell, wherein said domain comprises the amino acid sequence as depicted in SEQ ID NO: 642; or
d) an antibody construct comprising the amino acid sequence as depicted in SEQ ID NO: 661.

14. The method of claim 1, wherein the first domain which binds to BCMA comprises a VH region comprising CDR-H1, CDR-H2 and CDR-H3 and a VL region comprising CDR-L1, CDR-L2 and CDR-L3 selected from:
(1) CDR-H1 as depicted in SEQ ID NO: 1, CDR-H2 as depicted in SEQ ID NO: 2, CDR-H3 as depicted in SEQ ID NO: 3, CDR-L1 as depicted in SEQ ID NO: 4, CDR-L2 as depicted in SEQ ID NO: 5, and CDR-L3 as depicted in SEQ ID NO: 6;
(2) CDR-H1 as depicted in SEQ ID NO: 11, CDR-H2 as depicted in SEQ ID NO: 12, CDR-H3 as depicted in SEQ ID NO: 13, CDR-L1 as depicted in SEQ ID NO: 14, CDR-L2 as depicted in SEQ ID NO: 15, and CDR-L3 as depicted in SEQ ID NO: 16;
(3) CDR-H1 as depicted in SEQ ID NO: 21, CDR-H2 as depicted in SEQ ID NO: 22, CDR-H3 as depicted in SEQ ID NO: 23, CDR-L1 as depicted in SEQ ID NO: 24, CDR-L2 as depicted in SEQ ID NO: 25, and CDR-L3 as depicted in SEQ ID NO: 26;
(4) CDR-H1 as depicted in SEQ ID NO: 31, CDR-H2 as depicted in SEQ ID NO: 32, CDR-H3 as depicted in SEQ ID NO: 33, CDR-L1 as depicted in SEQ ID NO: 34, CDR-L2 as depicted in SEQ ID NO: 35, and CDR-L3 as depicted in SEQ ID NO: 36;
(5) CDR-H1 as depicted in SEQ ID NO: 41, CDR-H2 as depicted in SEQ ID NO: 42, CDR-H3 as depicted in SEQ ID NO: 43, CDR-L1 as depicted in SEQ ID NO: 44, CDR-L2 as depicted in SEQ ID NO: 45, and CDR-L3 as depicted in SEQ ID NO: 46;
(6) CDR-H1 as depicted in SEQ ID NO: 51, CDR-H2 as depicted in SEQ ID NO: 52, CDR-H3 as depicted in SEQ ID NO: 53, CDR-L1 as depicted in SEQ ID NO: 54, CDR-L2 as depicted in SEQ ID NO: 55, and CDR-L3 as depicted in SEQ ID NO: 56;
(7) CDR-H1 as depicted in SEQ ID NO: 61, CDR-H2 as depicted in SEQ ID NO: 62, CDR-H3 as depicted in SEQ ID NO: 63, CDR-L1 as depicted in SEQ ID NO: 64, CDR-L2 as depicted in SEQ ID NO: 65, and CDR-L3 as depicted in SEQ ID NO: 66;
(8) CDR-H1 as depicted in SEQ ID NO: 71, CDR-H2 as depicted in SEQ ID NO: 72, CDR-H3 as depicted in SEQ ID NO: 73, CDR-L1 as depicted in SEQ ID NO: 74, CDR-L2 as depicted in SEQ ID NO: 75, and CDR-L3 as depicted in SEQ ID NO: 76;
(9) CDR-H1 as depicted in SEQ ID NO: 81, CDR-H2 as depicted in SEQ ID NO: 82, CDR-H3 as depicted in SEQ ID NO: 83, CDR-L1 as depicted in SEQ ID NO: 84, CDR-L2 as depicted in SEQ ID NO: 85, and CDR-L3 as depicted in SEQ ID NO: 86;
(10) CDR-H1 as depicted in SEQ ID NO: 91, CDR-H2 as depicted in SEQ ID NO: 92, CDR-H3 as depicted in SEQ ID NO: 93, CDR-L1 as depicted in SEQ ID NO: 94, CDR-L2 as depicted in SEQ ID NO: 95, and CDR-L3 as depicted in SEQ ID NO: 96;
(11) CDR-H1 as depicted in SEQ ID NO: 101, CDR-H2 as depicted in SEQ ID NO: 102, CDR-H3 as depicted in SEQ ID NO: 103, CDR-L1 as depicted in SEQ ID NO: 104, CDR-L2 as depicted in SEQ ID NO: 105, and CDR-L3 as depicted in SEQ ID NO: 106;
(12) CDR-H1 as depicted in SEQ ID NO: 111, CDR-H2 as depicted in SEQ ID NO: 112, CDR-H3 as depicted in SEQ ID NO: 113, CDR-L1 as depicted in SEQ ID NO: 114, CDR-L2 as depicted in SEQ ID NO: 115, and CDR-L3 as depicted in SEQ ID NO: 116;
(13) CDR-H1 as depicted in SEQ ID NO: 121, CDR-H2 as depicted in SEQ ID NO: 122, CDR-H3 as depicted in SEQ ID NO: 123, CDR-L1 as depicted in SEQ ID NO: 124, CDR-L2 as depicted in SEQ ID NO: 125, and CDR-L3 as depicted in SEQ ID NO: 126;
(14) CDR-H1 as depicted in SEQ ID NO: 131, CDR-H2 as depicted in SEQ ID NO: 132, CDR-H3 as depicted in SEQ ID NO: 133, CDR-L1 as depicted in SEQ ID NO: 134, CDR-L2 as depicted in SEQ ID NO: 135, and CDR-L3 as depicted in SEQ ID NO: 136;
(15) CDR-H1 as depicted in SEQ ID NO: 141, CDR-H2 as depicted in SEQ ID NO: 142, CDR-H3 as depicted in SEQ ID NO: 143, CDR-L1 as depicted in SEQ ID NO: 144, CDR-L2 as depicted in SEQ ID NO: 145, and CDR-L3 as depicted in SEQ ID NO: 146;
(16) CDR-H1 as depicted in SEQ ID NO: 151, CDR-H2 as depicted in SEQ ID NO: 152, CDR-H3 as depicted in SEQ ID NO: 153, CDR-L1 as depicted in SEQ ID NO: 154, CDR-L2 as depicted in SEQ ID NO: 155, and CDR-L3 as depicted in SEQ ID NO: 156;
(17) CDR-H1 as depicted in SEQ ID NO: 161, CDR-H2 as depicted in SEQ ID NO: 162, CDR-H3 as depicted in SEQ ID NO: 163, CDR-L1 as depicted in SEQ ID NO: 164, CDR-L2 as depicted in SEQ ID NO: 165, and CDR-L3 as depicted in SEQ ID NO: 166;
(18) CDR-H1 as depicted in SEQ ID NO: 171, CDR-H2 as depicted in SEQ ID NO: 172, CDR-H3 as depicted in SEQ ID NO: 173, CDR-L1 as depicted in SEQ ID NO: 174, CDR-L2 as depicted in SEQ ID NO: 175, and CDR-L3 as depicted in SEQ ID NO: 176;
(19) CDR-H1 as depicted in SEQ ID NO: 181, CDR-H2 as depicted in SEQ ID NO: 182, CDR-H3 as depicted in SEQ ID NO: 183, CDR-L1 as depicted in SEQ ID NO: 184, CDR-L2 as depicted in SEQ ID NO: 185, and CDR-L3 as depicted in SEQ ID NO: 186;
(20) CDR-H1 as depicted in SEQ ID NO: 191, CDR-H2 as depicted in SEQ ID NO: 192, CDR-H3 as depicted in SEQ ID NO: 193, CDR-L1 as depicted in SEQ ID NO: 194, CDR-L2 as depicted in SEQ ID NO: 195, and CDR-L3 as depicted in SEQ ID NO: 196;
(21) CDR-H1 as depicted in SEQ ID NO: 201, CDR-H2 as depicted in SEQ ID NO: 202, CDR-H3 as depicted in SEQ ID NO: 203, CDR-L1 as depicted in SEQ ID NO: 204, CDR-L2 as depicted in SEQ ID NO: 205, and CDR-L3 as depicted in SEQ ID NO: 206;
(22) CDR-H1 as depicted in SEQ ID NO: 211, CDR-H2 as depicted in SEQ ID NO: 212, CDR-H3 as depicted in SEQ ID NO: 213, CDR-L1 as depicted in SEQ ID NO: 214, CDR-L2 as depicted in SEQ ID NO: 215, and CDR-L3 as depicted in SEQ ID NO: 216;
(23) CDR-H1 as depicted in SEQ ID NO: 221, CDR-H2 as depicted in SEQ ID NO: 222, CDR-H3 as depicted in SEQ ID NO: 223, CDR-L1 as depicted in SEQ ID NO: 224, CDR-L2 as depicted in SEQ ID NO: 225, and CDR-L3 as depicted in SEQ ID NO: 226;
(24) CDR-H1 as depicted in SEQ ID NO: 231, CDR-H2 as depicted in SEQ ID NO: 232, CDR-H3 as depicted in SEQ ID NO: 233, CDR-L1 as depicted in SEQ ID NO: 234, CDR-L2 as depicted in SEQ ID NO: 235, and CDR-L3 as depicted in SEQ ID NO: 236;
(25) CDR-H1 as depicted in SEQ ID NO: 241, CDR-H2 as depicted in SEQ ID NO: 242, CDR-H3 as depicted in SEQ ID NO: 243, CDR-L1 as depicted in SEQ ID NO: 244, CDR-L2 as depicted in SEQ ID NO: 245, and CDR-L3 as depicted in SEQ ID NO: 246;
(26) CDR-H1 as depicted in SEQ ID NO: 251, CDR-H2 as depicted in SEQ ID NO: 252, CDR-H3 as depicted in SEQ ID NO: 253, CDR-L1 as depicted in SEQ ID NO: 254, CDR-L2 as depicted in SEQ ID NO: 255, and CDR-L3 as depicted in SEQ ID NO: 256;
(27) CDR-H1 as depicted in SEQ ID NO: 261, CDR-H2 as depicted in SEQ ID NO: 262, CDR-H3 as depicted in SEQ ID NO: 263, CDR-L1 as depicted in SEQ ID NO: 264, CDR-L2 as depicted in SEQ ID NO: 265, and CDR-L3 as depicted in SEQ ID NO: 266;
(28) CDR-H1 as depicted in SEQ ID NO: 271, CDR-H2 as depicted in SEQ ID NO: 272, CDR-H3 as depicted in SEQ ID NO: 273, CDR-L1 as depicted in SEQ ID NO: 274, CDR-L2 as depicted in SEQ ID NO: 275, and CDR-L3 as depicted in SEQ ID NO: 276;
(29) CDR-H1 as depicted in SEQ ID NO: 281, CDR-H2 as depicted in SEQ ID NO: 282, CDR-H3 as depicted in SEQ ID NO: 283, CDR-L1 as depicted in SEQ ID NO: 284, CDR-L2 as depicted in SEQ ID NO: 285, and CDR-L3 as depicted in SEQ ID NO: 286;
(30) CDR-H1 as depicted in SEQ ID NO: 291, CDR-H2 as depicted in SEQ ID NO: 292, CDR-H3 as depicted in SEQ ID NO: 293, CDR-L1 as depicted in SEQ ID NO: 294, CDR-L2 as depicted in SEQ ID NO: 295, and CDR-L3 as depicted in SEQ ID NO: 296;
(31) CDR-H1 as depicted in SEQ ID NO: 301, CDR-H2 as depicted in SEQ ID NO: 302, CDR-H3 as depicted in SEQ ID NO: 303, CDR-L1 as depicted in SEQ ID NO: 304, CDR-L2 as depicted in SEQ ID NO: 305, and CDR-L3 as depicted in SEQ ID NO: 306;
(32) CDR-H1 as depicted in SEQ ID NO: 311, CDR-H2 as depicted in SEQ ID NO: 312, CDR-H3 as depicted in SEQ ID NO: 313, CDR-L1 as depicted in SEQ ID NO: 314, CDR-L2 as depicted in SEQ ID NO: 315, and CDR-L3 as depicted in SEQ ID NO: 316;
(33) CDR-H1 as depicted in SEQ ID NO: 321, CDR-H2 as depicted in SEQ ID NO: 322, CDR-H3 as depicted in SEQ ID NO: 323, CDR-L1 as depicted in SEQ ID NO: 324, CDR-L2 as depicted in SEQ ID NO: 325, and CDR-L3 as depicted in SEQ ID NO: 326;
(34) CDR-H1 as depicted in SEQ ID NO: 331, CDR-H2 as depicted in SEQ ID NO: 332, CDR-H3 as depicted in SEQ ID NO: 333, CDR-L1 as depicted in SEQ ID NO: 334, CDR-L2 as depicted in SEQ ID NO: 335, and CDR-L3 as depicted in SEQ ID NO: 336;
(35) CDR-H1 as depicted in SEQ ID NO: 341, CDR-H2 as depicted in SEQ ID NO: 342, CDR-H3 as depicted in SEQ ID NO: 343, CDR-L1 as depicted in SEQ ID NO: 344, CDR-L2 as depicted in SEQ ID NO: 345, and CDR-L3 as depicted in SEQ ID NO: 346;
(36) CDR-H1 as depicted in SEQ ID NO: 351, CDR-H2 as depicted in SEQ ID NO: 352, CDR-H3 as depicted in SEQ ID NO: 353, CDR-L1 as depicted in SEQ ID NO: 354, CDR-L2 as depicted in SEQ ID NO: 355, and CDR-L3 as depicted in SEQ ID NO: 356;
(37) CDR-H1 as depicted in SEQ ID NO: 361, CDR-H2 as depicted in SEQ ID NO: 362, CDR-H3 as depicted in SEQ ID NO: 363, CDR-L1 as depicted in SEQ ID NO: 364, CDR-L2 as depicted in SEQ ID NO: 365, and CDR-L3 as depicted in SEQ ID NO: 366;
(38) CDR-H1 as depicted in SEQ ID NO: 371, CDR-H2 as depicted in SEQ ID NO: 372, CDR-H3 as depicted in SEQ ID NO: 373, CDR-L1 as depicted in SEQ ID NO: 374, CDR-L2 as depicted in SEQ ID NO: 375, and CDR-L3 as depicted in SEQ ID NO: 376;
(39) CDR-H1 as depicted in SEQ ID NO: 381, CDR-H2 as depicted in SEQ ID NO: 382, CDR-H3 as depicted in SEQ ID NO: 383, CDR-L1 as depicted in SEQ ID NO: 384, CDR-L2 as depicted in SEQ ID NO: 385, and CDR-L3 as depicted in SEQ ID NO: 386;
(40) CDR-H1 as depicted in SEQ ID NO: 391, CDR-H2 as depicted in SEQ ID NO: 392, CDR-H3 as depicted in SEQ ID NO: 393, CDR-L1 as depicted in SEQ ID NO: 394, CDR-L2 as depicted in SEQ ID NO: 395, and CDR-L3 as depicted in SEQ ID NO: 396;
(41) CDR-H1 as depicted in SEQ ID NO: 401, CDR-H2 as depicted in SEQ ID NO: 402, CDR-H3 as depicted in SEQ ID NO: 403, CDR-L1 as depicted in SEQ ID NO: 404, CDR-L2 as depicted in SEQ ID NO: 405, and CDR-L3 as depicted in SEQ ID NO: 406;
(42) CDR-H1 as depicted in SEQ ID NO: 411, CDR-H2 as depicted in SEQ ID NO: 412, CDR-H3 as depicted in SEQ ID NO: 413, CDR-L1 as depicted in SEQ ID NO: 414, CDR-L2 as depicted in SEQ ID NO: 415, and CDR-L3 as depicted in SEQ ID NO: 416;
(43) CDR-H1 as depicted in SEQ ID NO: 421, CDR-H2 as depicted in SEQ ID NO: 422, CDR-H3 as depicted in SEQ ID NO: 423, CDR-L1 as depicted in SEQ ID NO: 424, CDR-L2 as depicted in SEQ ID NO: 425, and CDR-L3 as depicted in SEQ ID NO: 426;
(44) CDR-H1 as depicted in SEQ ID NO: 431, CDR-H2 as depicted in SEQ ID NO: 432, CDR-H3 as depicted in SEQ ID NO: 433, CDR-L1 as depicted in SEQ ID NO: 434, CDR-L2 as depicted in SEQ ID NO: 435, and CDR-L3 as depicted in SEQ ID NO: 436;
(45) CDR-H1 as depicted in SEQ ID NO: 441, CDR-H2 as depicted in SEQ ID NO: 442, CDR-H3 as depicted in SEQ ID NO: 443, CDR-L1 as depicted in SEQ ID NO: 444, CDR-L2 as depicted in SEQ ID NO: 445, and CDR-L3 as depicted in SEQ ID NO: 446;
(46) CDR-H1 as depicted in SEQ ID NO: 451, CDR-H2 as depicted in SEQ ID NO: 452, CDR-H3 as depicted in SEQ ID NO: 453, CDR-L1 as depicted in SEQ ID NO: 454, CDR-L2 as depicted in SEQ ID NO: 455, and CDR-L3 as depicted in SEQ ID NO: 456;
(47) CDR-H1 as depicted in SEQ ID NO: 461, CDR-H2 as depicted in SEQ ID NO: 462, CDR-H3 as depicted in SEQ ID NO: 463, CDR-L1 as depicted in SEQ ID NO: 464, CDR-L2 as depicted in SEQ ID NO: 465, and CDR-L3 as depicted in SEQ ID NO: 466;
(48) CDR-H1 as depicted in SEQ ID NO: 471, CDR-H2 as depicted in SEQ ID NO: 472, CDR-H3 as depicted in SEQ ID NO: 473, CDR-L1 as depicted in SEQ ID NO: 474, CDR-L2 as depicted in SEQ ID NO: 475, and CDR-L3 as depicted in SEQ ID NO: 476;
(49) CDR-H1 as depicted in SEQ ID NO: 481, CDR-H2 as depicted in SEQ ID NO: 482, CDR-H3 as depicted in SEQ ID NO: 483, CDR-L1 as depicted in SEQ ID NO: 484, CDR-L2 as depicted in SEQ ID NO: 485, and CDR-L3 as depicted in SEQ ID NO: 486;
(50) CDR-H1 as depicted in SEQ ID NO: 491, CDR-H2 as depicted in SEQ ID NO: 492, CDR-H3 as depicted in SEQ ID NO: 493, CDR-L1 as depicted in SEQ ID NO: 494, CDR-L2 as depicted in SEQ ID NO: 495, and CDR-L3 as depicted in SEQ ID NO: 496;
(51) CDR-H1 as depicted in SEQ ID NO: 501, CDR-H2 as depicted in SEQ ID NO: 502, CDR-H3 as depicted in SEQ ID NO: 503, CDR-L1 as depicted in SEQ ID NO: 504, CDR-L2 as depicted in SEQ ID NO: 505, and CDR-L3 as depicted in SEQ ID NO: 506;
(52) CDR-H1 as depicted in SEQ ID NO: 511, CDR-H2 as depicted in SEQ ID NO: 512, CDR-H3 as depicted in SEQ ID NO: 513, CDR-L1 as depicted in SEQ ID NO: 514, CDR-L2 as depicted in SEQ ID NO: 515, and CDR-L3 as depicted in SEQ ID NO: 516; and
(53) CDR-H1 as depicted in SEQ ID NO: 521, CDR-H2 as depicted in SEQ ID NO: 522, CDR-H3 as depicted in SEQ ID NO: 523, CDR-L1 as depicted in SEQ ID NO: 524, CDR-L2 as depicted in SEQ ID NO: 525, and CDR-L3 as depicted in SEQ ID NO: 526.

15. The method of claim 1, wherein the first domain which binds to BCMA comprises a VH region comprising an amino acid sequence selected from the group consisting of those depicted in SEQ ID NOs: 7, 17, 27, 37, 47, 57, 67, 77, 87, 97, 107, 117, 127, 137, 147, 157, 167, 177, 187, 197, 207, 217, 227, 237, 247, 257, 267, 277, 287, 307, 317, 327, 337, 347, 357, 367, 377, 387, 397, 407, 417, 427, 437, 447, 457, 467, 477, 487, 497, 507, 517, and 527; and/or
wherein the first domain which binds to BCMA comprises a VL region comprising an amino acid sequence selected from the group consisting of those depicted in SEQ ID NOs: 8, 18, 28, 38, 48, 58, 68, 78, 88, 98, 108, 118, 128, 138, 148, 158, 168, 178, 188, 198, 208, 218, 228, 238, 248, 258, 268, 278, 288, 298, 308, 318, 328, 338, 348, 358, 368, 378, 388, 398, 408, 418, 428, 438, 448, 458, 468, 478, 488, 498, 508, 518, and 528.

16. (canceled)

17. The method of claim 1, wherein the first domain which binds to BCMA comprises a VH region and a VL region selected from the group consisting of:
(1) a VH region as depicted in SEQ ID NO: 7 and a VL region as depicted in SEQ ID NO: 8;
(2) a VH region as depicted in SEQ ID NO: 17 and a VL region as depicted in SEQ ID NO: 18;
(3) a VH region as depicted in SEQ ID NO: 27 and a VL region as depicted in SEQ ID NO: 28;
(4) a VH region as depicted in SEQ ID NO: 37 and a VL region as depicted in SEQ ID NO: 38;
(5) a VH region as depicted in SEQ ID NO: 47 and a VL region as depicted in SEQ ID NO: 48;
(6) a VH region as depicted in SEQ ID NO: 57 and a VL region as depicted in SEQ ID NO: 58;
(7) a VH region as depicted in SEQ ID NO: 67 and a VL region as depicted in SEQ ID NO: 68;
(8) a VH region as depicted in SEQ ID NO: 77 and a VL region as depicted in SEQ ID NO: 78;
(9) a VH region as depicted in SEQ ID NO: 87 and a VL region as depicted in SEQ ID NO: 88;
(10) a VH region as depicted in SEQ ID NO: 97 and a VL region as depicted in SEQ ID NO: 98;
(11) a VH region as depicted in SEQ ID NO: 107 and a VL region as depicted in SEQ ID NO: 108;
(12) a VH region as depicted in SEQ ID NO: 117 and a VL region as depicted in SEQ ID NO: 118;
(13) a VH region as depicted in SEQ ID NO: 127 and a VL region as depicted in SEQ ID NO: 128;
(14) a VH region as depicted in SEQ ID NO: 137 and a VL region as depicted in SEQ ID NO: 138;
(15) a VH region as depicted in SEQ ID NO: 147 and a VL region as depicted in SEQ ID NO: 148;
(16) a VH region as depicted in SEQ ID NO: 157 and a VL region as depicted in SEQ ID NO: 158;
(17) a VH region as depicted in SEQ ID NO: 167 and a VL region as depicted in SEQ ID NO: 168;
(18) a VH region as depicted in SEQ ID NO: 177 and a VL region as depicted in SEQ ID NO: 178;
(19) a VH region as depicted in SEQ ID NO: 187 and a VL region as depicted in SEQ ID NO: 188;
(20) a VH region as depicted in SEQ ID NO: 197 and a VL region as depicted in SEQ ID NO: 198;
(21) a VH region as depicted in SEQ ID NO: 207 and a VL region as depicted in SEQ ID NO: 208;
(22) a VH region as depicted in SEQ ID NO: 217 and a VL region as depicted in SEQ ID NO: 218;
(23) a VH region as depicted in SEQ ID NO: 227 and a VL region as depicted in SEQ ID NO: 228;
(24) a VH region as depicted in SEQ ID NO: 237 and a VL region as depicted in SEQ ID NO: 238;
(25) a VH region as depicted in SEQ ID NO: 247 and a VL region as depicted in SEQ ID NO: 248;
(26) a VH region as depicted in SEQ ID NO: 257 and a VL region as depicted in SEQ ID NO: 258;
(27) a VH region as depicted in SEQ ID NO: 267 and a VL region as depicted in SEQ ID NO: 268;
(28) a VH region as depicted in SEQ ID NO: 277 and a VL region as depicted in SEQ ID NO: 278;
(29) a VH region as depicted in SEQ ID NO: 287 and a VL region as depicted in SEQ ID NO: 288;
(30) a VH region as depicted in SEQ ID NO: 297 and a VL region as depicted in SEQ ID NO: 298;
(31) a VH region as depicted in SEQ ID NO: 307 and a VL region as depicted in SEQ ID NO: 308;
(32) a VH region as depicted in SEQ ID NO: 317 and a VL region as depicted in SEQ ID NO: 318;
(33) a VH region as depicted in SEQ ID NO: 327 and a VL region as depicted in SEQ ID NO: 328;
(34) a VH region as depicted in SEQ ID NO: 337 and a VL region as depicted in SEQ ID NO: 338;
(35) a VH region as depicted in SEQ ID NO: 347 and a VL region as depicted in SEQ ID NO: 348;
(36) a VH region as depicted in SEQ ID NO: 357 and a VL region as depicted in SEQ ID NO: 358;
(37) a VH region as depicted in SEQ ID NO: 367 and a VL region as depicted in SEQ ID NO: 368;
(38) a VH region as depicted in SEQ ID NO: 377 and a VL region as depicted in SEQ ID NO: 378;
(39) a VH region as depicted in SEQ ID NO: 387 and a VL region as depicted in SEQ ID NO: 388;
(40) a VH region as depicted in SEQ ID NO: 397 and a VL region as depicted in SEQ ID NO: 398;
(41) a VH region as depicted in SEQ ID NO: 407 and a VL region as depicted in SEQ ID NO: 408;
(42) a VH region as depicted in SEQ ID NO: 417 and a VL region as depicted in SEQ ID NO: 418;
(43) a VH region as depicted in SEQ ID NO: 427 and a VL region as depicted in SEQ ID NO: 428;
(44) a VH region as depicted in SEQ ID NO: 437 and a VL region as depicted in SEQ ID NO: 438;
(45) a VH region as depicted in SEQ ID NO: 447 and a VL region as depicted in SEQ ID NO: 448;
(46) a VH region as depicted in SEQ ID NO: 457 and a VL region as depicted in SEQ ID NO: 458;
(47) a VH region as depicted in SEQ ID NO: 467 and a VL region as depicted in SEQ ID NO: 468;
(48) a VH region as depicted in SEQ ID NO: 477 and a VL region as depicted in SEQ ID NO: 478;
(49) a VH region as depicted in SEQ ID NO: 487 and a VL region as depicted in SEQ ID NO: 488;
(50) a VH region as depicted in SEQ ID NO: 497 and a VL region as depicted in SEQ ID NO: 498;
(51) a VH region as depicted in SEQ ID NO: 507 and a VL region as depicted in SEQ ID NO: 508;
(52) a VH region as depicted in SEQ ID NO: 517 and a VL region as depicted in SEQ ID NO: 518; and
(53) a VH region as depicted in SEQ ID NO: 527 and a VL region as depicted in SEQ ID NO: 528.

18. The method of claim 1, wherein the first domain which binds to BCMA comprises or consists of a polypeptide comprising an amino acid sequence selected from the group consisting of SEQ ID NOs: 9, 19, 29, 39, 49, 59, 69, 79, 89, 109, 129, 139, 149, 159, 169, 179, 189, 199, 209, 219, 229, 239, 249, 259, 269, 279, 289, 299, 309, 319, 329, 339, 349, 359, 369, 379, 389, 399, 409, 419, 429, 439, 449, 459, 469, 479, 489, 499, 519, and 529.

19. The method of claim 1, wherein the second domain which binds to CD3 comprises a VL region comprising CDR-L1, CDR-L2 and CDR-L3 selected from the group consisting of:
(a) CDR-L1 as depicted in SEQ ID NO: 542, CDR-L2 as depicted in SEQ ID NO: 543, and CDR-L3 as depicted in SEQ ID NO: 544;
(b) CDR-L1 as depicted in SEQ ID NO: 599, CDR-L2 as depicted in SEQ ID NO: 600, and CDR-L3 as depicted in SEQ ID NO: 601; and
(c) CDR-L1 as depicted in SEQ ID NO: 621, CDR-L2 as depicted in SEQ ID NO: 622, and CDR-L3 as depicted in SEQ ID NO: 623; and/or
wherein the second domain which binds to CD3 comprises a VH region comprising CDR-H1, CDR-H2 and CDR-H3 selected from the group consisting of:
(a) CDR-H1 as depicted in SEQ ID NO: 534, CDR-H2 as depicted in SEQ ID NO: 535, and CDR-H3 as depicted in SEQ ID NO: 536;
(b) CDR-H1 as depicted in SEQ ID NO: 545, CDR-H2 as depicted in SEQ ID NO: 546, and CDR-H3 as depicted in SEQ ID NO: 547;
(c) CDR-H1 as depicted in SEQ ID NO: 557, CDR-H2 as depicted in SEQ ID NO: 558, and CDR-H3 as depicted in SEQ ID NO: 559;
(d) CDR-H1 as depicted in SEQ ID NO: 568, CDR-H2 as depicted in SEQ ID NO: 569, and CDR-H3 as depicted in SEQ ID NO: 570;
(e) CDR-H1 as depicted in SEQ ID NO: 579, CDR-H2 as depicted in SEQ ID NO: 580, and CDR-H3 as depicted in SEQ ID NO: 581;
(f) CDR-H1 as depicted in SEQ ID NO: 591, CDR-H2 as depicted in SEQ ID NO: 592, and CDR-H3 as depicted in SEQ ID NO: 593;
(g) CDR-H1 as depicted in SEQ ID NO: 602, CDR-H2 as depicted in SEQ ID NO: 603, and CDR-H3 as depicted in SEQ ID NO: 604;
(h) CDR-H1 as depicted in SEQ ID NO: 613, CDR-H2 as depicted in SEQ ID NO: 614, and CDR-H3 as depicted in SEQ ID NO: 615;
(i) CDR-H1 as depicted in SEQ ID NO: 624, CDR-H2 as depicted in SEQ ID NO: 625, and CDR-H3 as depicted in SEQ ID NO: 626; and
(j) CDR-H1 as depicted in SEQ ID NO: 636, CDR-H2 as depicted in SEQ ID NO: 637, and CDR-H3 as depicted in SEQ ID NO: 638.

20. (canceled)

21. The method of claim 1, wherein the second domain which binds to CD3 comprises a VL region comprising CDR-L1, CDR-L2 and CDR-L3 and a VH region comprising CDR-H1, CDR-H2 and CDR-H3 selected from the group consisting of:
(a) CDR-L1 as depicted in SEQ ID NO: 531, CDR-L2 as depicted in SEQ ID NO: 532, CDR-L3 as depicted in SEQ ID NO: 533, CDR-H1 as depicted in SEQ ID NO: 534, CDR-H2 as depicted in SEQ ID NO: 535, and CDR-H3 as depicted in SEQ ID NO: 536;
(b) CDR-L1 as depicted in SEQ ID NO: 542, CDR-L2 as depicted in SEQ ID NO: 543, CDR-L3 as depicted in SEQ ID NO: 544, CDR-H1 as depicted in SEQ ID NO: 545, CDR-H2 as depicted in SEQ ID NO: 546, and CDR-H3 as depicted in SEQ ID NO: 547;
(c) CDR-L1 as depicted in SEQ ID NO: 554, CDR-L2 as depicted in SEQ ID NO: 555, CDR-L3 as depicted in SEQ ID NO: 556, CDR-H1 as depicted in SEQ ID NO: 557, CDR-H2 as depicted in SEQ ID NO: 558, and CDR-H3 as depicted in SEQ ID NO: 559;
(d) CDR-L1 as depicted in SEQ ID NO: 565, CDR-L2 as depicted in SEQ ID NO: 566, CDR-L3 as depicted in SEQ ID NO: 567, CDR-H1 as depicted in SEQ ID NO: 568, CDR-H2 as depicted in SEQ ID NO: 569, and CDR-H3 as depicted in SEQ ID NO: 570;
(e) CDR-L1 as depicted in SEQ ID NO: 576, CDR-L2 as depicted in SEQ ID NO: 577, CDR-L3 as depicted in SEQ ID NO: 578, CDR-H1 as depicted in SEQ ID NO: 579, CDR-H2 as depicted in SEQ ID NO: 580, and CDR-H3 as depicted in SEQ ID NO: 581;
(f) CDR-L1 as depicted in SEQ ID NO: 588, CDR-L2 as depicted in SEQ ID NO: 589, CDR-L3 as depicted in SEQ ID NO: 590, CDR-H1 as depicted in SEQ ID NO: 591, CDR-H2 as depicted in SEQ ID NO: 592, and CDR-H3 as depicted in SEQ ID NO: 593;
(g) CDR-L1 as depicted in SEQ ID NO: 599, CDR-L2 as depicted in SEQ ID NO: 600, CDR-L3 as depicted in SEQ ID NO: 601, CDR-H1 as depicted in SEQ ID NO: 602, CDR-H2 as depicted in SEQ ID NO: 603, and CDR-H3 as depicted in SEQ ID NO: 604;
(h) CDR-L1 as depicted in SEQ ID NO: 610, CDR-L2 as depicted in SEQ ID NO: 611, CDR-L3 as depicted in SEQ ID NO: 612, CDR-H1 as depicted in SEQ ID NO: 613, CDR-H2 as depicted in SEQ ID NO: 614, and CDR-H3 as depicted in SEQ ID NO: 615;
(i) CDR-L1 as depicted in SEQ ID NO: 621, CDR-L2 as depicted in SEQ ID NO: 622, CDR-L3 as depicted in SEQ ID NO: 623, CDR-H1 as depicted in SEQ ID NO: 624, CDR-H2 as depicted in SEQ ID NO: 625, and CDR-H3 as depicted in SEQ ID NO: 626; and
(j) CDR-L1 as depicted in SEQ ID NO: 633, CDR-L2 as depicted in SEQ ID NO: 634, CDR-L3 as depicted in SEQ ID NO: 635, CDR-H1 as depicted in SEQ ID NO: 636, CDR-H2 as depicted in SEQ ID NO: 637, and CDR-H3 as depicted in SEQ ID NO: 638.

22. The method of claim 1, wherein the second domain which binds to CD3 comprises a VL region comprising an amino acid sequence selected from the group consisting of those depicted in SEQ ID NO: 550, SEQ ID NO: 551, SEQ ID NO: 584, SEQ ID NO: 585, SEQ ID NO: 629 and SEQ ID NO: 630; and/or
wherein the second domain which binds to CD3 comprises a VH region comprising an amino acid sequence selected from the group consisting of those depicted in SEQ ID NO: 537, SEQ ID NO: 538, SEQ ID NO: 548, SEQ ID NO: 549, SEQ ID NO: 560, SEQ ID NO: 561, SEQ ID NO: 571, SEQ ID NO: 572, SEQ ID NO: 582, SEQ ID NO: 583, SEQ ID NO: 594, SEQ ID NO: 595, SEQ ID NO: 605, SEQ ID NO: 606, SEQ ID NO: 616, SEQ ID NO: 617, SEQ ID NO: 627, SEQ ID NO: 628, SEQ ID NO: 639, SEQ ID NO: 640, and SEQ ID NO: 644.

23. (canceled)

24. The method of claim 1, wherein the second domain which binds to CD3 comprises a VL region and a VH region selected from the group consisting of:
(a) a VL region as depicted in SEQ ID NO: 539 or 521 and a VH region as depicted in SEQ ID NO: 537 or 538;
(b) a VL region as depicted in SEQ ID NO: 550 or 521 and a VH region as depicted in SEQ ID NO: 548 or 549;
(c) a VL region as depicted in SEQ ID NO: 562 or 521 and a VH region as depicted in SEQ ID NO: 560 or 561;
(d) a VL region as depicted in SEQ ID NO: 573 or 521 and a VH region as depicted in SEQ ID NO: 571 or 572;
(e) a VL region as depicted in SEQ ID NO: 584 or 585 and a VH region as depicted in SEQ ID NO: 582 or 583;
(f) a VL region as depicted in SEQ ID NO: 596 or 521 and a VH region as depicted in SEQ ID NO: 594 or 595;
(g) a VL region as depicted in SEQ ID NO: 607 or 585 and a VH region as depicted in SEQ ID NO: 605 or 606;
(h) a VL region as depicted in SEQ ID NO: 618 or 521 and a VH region as depicted in SEQ ID NO: 616 or 617;
(i) a VL region as depicted in SEQ ID NO: 629 or 630 and a VH region as depicted in SEQ ID NO: 627 or 628;
(j) a VL region as depicted in SEQ ID NO: 641 or 630 and a VH region as depicted in SEQ ID NO: 639 or 640; and
(k) a VL region as depicted in SEQ ID NO: 645 and a VH region as depicted in SEQ ID NO: 644.

25. The method of claim 1, wherein the second domain which binds to CD3 comprises or consists of a polypeptide comprising an amino acid sequence selected from the group consisting of those depicted in SEQ ID NOs: 540, 541, 552, 553, 563, 564, 574, 575, 586, 587, 597, 598, 608, 609, 619, 620, 631, 632, 642, 643, and 646.

26. The method of claim 1, wherein the antibody construct comprises a polypeptide comprising an amino acid sequence selected from the group consisting of those depicted in SEQ ID NOs: 10, 20, 30, 40, 50, 60, 70, 80, 90, 100, 110, 120, 130, 140, 150, 160, 170, 180, 190, 200, 210, 220, 230, 240, 250, 260, 270, 280, 290, 300, 310, 320, 330, 340, 350, 360, 370, 380, 390, 400, 410, 420, 430, 440, 450, 460, 470, 480, 490, 500, 510, 520, 530 and 661.

The application's sequence listing, which the Patent Office published only in electronic form, follows.

SEQUENCE LISTING (699 sequences)

SEQ ID NO: 1 - protein, 5 aa, Artificial Sequence
  Synthetic Polypeptide
NYDMA

SEQ ID NO: 2 - protein, 17 aa, Artificial Sequence
  Synthetic Polypeptide
SIITSGDATYYRDSVKG

SEQ ID NO: 3 - protein, 12 aa, Artificial Sequence
  Synthetic Polypeptide
HDYYDGSYGFAY

SEQ ID NO: 4 - protein, 11 aa, Artificial Sequence
  Synthetic Polypeptide
KASQSVGINVD

SEQ ID NO: 5 - protein, 7 aa, Artificial Sequence
  Synthetic Polypeptide
GASNRHT

SEQ ID NO: 6 - protein, 9 aa, Artificial Sequence
  Synthetic Polypeptide
LQYGSIPFT

SEQ ID NO: 7 - protein, 121 aa, Artificial Sequence
  Synthetic Polypeptide
QVQLVESGGGVVQPGRSLRLSCAASGFTFSNYDMAWVRQAPGKGLEWVASIITSGDATYYRDSVKGRFTISRDNSKNTLYLQMNSLRAEDTAVYYCVRHDYYDGSYGFAYWGQGTLVTVSS

SEQ ID NO: 8 - protein, 107 aa, Artificial Sequence
  Synthetic Polypeptide
EIVMTQSPATLSVSPGERVTLSCKASQSVGINVDWYQQKPGQAPRLLIYGASNRHTGIPARFSGSGSGREFTLTISSLQSEDFAVYYCLQYGSIPFTFGPGTKVDIK

SEQ ID NO: 9 - protein, 243 aa, Artificial Sequence
  Synthetic Polypeptide
QVQLVESGGGVVQPGRSLRLSCAASGFTFSNYDMAWVRQAPGKGLEWVASIITSGDATYYRDSVKGRFTISRDNSKNTLYLQMNSLRAEDTAVYYCVRHDYYDGSYGFAYWGQGTLVTVSSGGGGSGGGGSGGGGSEIVMTQSPATLSVSPGERVTLSCKASQSVGINVDWYQQKPGQAPRLLIYGASNRHTGIPARFSGSGSGREFTLTISSLQSEDFAVYYCLQYGSIPFTFGPGTKVDIK

SEQ ID NO: 10 - protein, 498 aa, Artificial Sequence
  Synthetic Polypeptide
QVQLVESGGGVVQPGRSLRLSCAASGFTFSNYDMAWVRQAPGKGLEWVASIITSGDATYYRDSVKGRFTISRDNSKNTLYLQMNSLRAEDTAVYYCVRHDYYDGSYGFAYWGQGTLVTVSSGGGGSGGGGSGGGGSEIVMTQSPATLSVSPGERVTLSCKASQSVGINVDWYQQKPGQAPRLLIYGASNRHTGIPARFSGSGSGREFTLTISSLQSEDFAVYYCLQYGSIPFTFGPGTKVDIKSGGGGSEVQLVESGGGLVQPGGSLKLSCAASGFTFNKYAMNWVRQAPGKGLEWVARIRSKYNNYATYYADSVKDRFTISRDDSKNTAYLQMNNLKTEDTAVYYCVRHGNFGNSYISYWAYWGQGTLVTVSSGGGGSGGGGSGGGGSQTVVTQEPSLTVSPGGTVTLTCGSSTGAVTSGNYPNWVQQKPGQAPRGLIGGTKFLAPGTPARFSGSLLGGKAALTLSGVQPEDEAEYYCVLWYSNRWVFGGGTKLTVL

SEQ ID NO: 11 - protein, 5 aa, Artificial Sequence
  Synthetic Polypeptide
NYDMA

SEQ ID NO: 12 - protein, 17 aa, Artificial Sequence
  Synthetic Polypeptide
SIITSGDMTYYRDSVKG

SEQ ID NO: 13 - protein, 12 aa, Artificial Sequence
  Synthetic Polypeptide
HDYYDGSYGFAY

SEQ ID NO: 14 - protein, 11 aa, Artificial Sequence
  Synthetic Polypeptide
KASQSVGINVD

SEQ ID NO: 15 - protein, 7 aa, Artificial Sequence
  Synthetic Polypeptide
GASNRHT

SEQ ID NO: 16 - protein, 9 aa, Artificial Sequence
  Synthetic Polypeptide
LQYGSIPFT

SEQ ID NO: 17 - protein, 121 aa, Artificial Sequence
  Synthetic Polypeptide
QVQLVESGGGVVQPGRSLRLSCAASGFTFSNYDMAWVRQAPGKGLEWVASIITSGDMTYYRDSVKGRFTISRDNSKNTLYLQMNSLRAEDTAVYYCVRHDYYDGSYGFAYWGQGTLVTVSS

SEQ ID NO: 18 - protein, 107 aa, Artificial Sequence; identical to SEQ ID NO: 8
  Synthetic Polypeptide

SEQ ID NO: 19 - protein, 243 aa, Artificial Sequence
  Synthetic Polypeptide
QVQLVESGGGVVQPGRSLRLSCAASGFTFSNYDMAWVRQAPGKGLEWVASIITSGDMTYYRDSVKGRFTISRDNSKNTLYLQMNSLRAEDTAVYYCVRHDYYDGSYGFAYWGQGTLVTVSSGGGGSGGGGSGGGGSEIVMTQSPATLSVSPGERVTLSCKASQSVGINVDWYQQKPGQAPRLLIYGASNRHTGIPARFSGSGSGREFTLTISSLQSEDFAVYYCLQYGSIPFTFGPGTKVDIK

SEQ ID NO: 20 - protein, 498 aa, Artificial Sequence
  Synthetic Polypeptide
QVQLVESGGGVVQPGRSLRLSCAASGFTFSNYDMAWVRQAPGKGLEWVASIITSGDMTYYRDSVKGRFTISRDNSKNTLYLQMNSLRAEDTAVYYCVRHDYYDGSYGFAYWGQGTLVTVSSGGGGSGGGGSGGGGSEIVMTQSPATLSVSPGERVTLSCKASQSVGINVDWYQQKPGQAPRLLIYGASNRHTGIPARFSGSGSGREFTLTISSLQSEDFAVYYCLQYGSIPFTFGPGTKVDIKSGGGGSEVQLVESGGGLVQPGGSLKLSCAASGFTFNKYAMNWVRQAPGKGLEWVARIRSKYNNYATYYADSVKDRFTISRDDSKNTAYLQMNNLKTEDTAVYYCVRHGNFGNSYISYWAYWGQGTLVTVSSGGGGSGGGGSGGGGSQTVVTQEPSLTVSPGGTVTLTCGSSTGAVTSGNYPNWVQQKPGQAPRGLIGGTKFLAPGTPARFSGSLLGGKAALTLSGVQPEDEAEYYCVLWYSNRWVFGGGTKLTVL

SEQ ID NO: 21 - protein, 5 aa, Artificial Sequence
  Synthetic Polypeptide
NYDMA

SEQ ID NO: 22 - protein, 17 aa, Artificial Sequence
  Synthetic Polypeptide
SIITSGDATYYRDSVKG

SEQ ID NO: 23 - protein, 12 aa, Artificial Sequence
  Synthetic Polypeptide
HDYYDGSYGFAY

SEQ ID NO: 24 - protein, 11 aa, Artificial Sequence
  Synthetic Polypeptide
KASQSVGINVD

SEQ ID NO: 25 - protein, 7 aa, Artificial Sequence
  Synthetic Polypeptide
GASNRHT

SEQ ID NO: 26 - protein, 9 aa, Artificial Sequence
  Synthetic Polypeptide
LQYGSIPFT

SEQ ID NO: 27 - protein, 121 aa, Artificial Sequence
  Synthetic Polypeptide
QVQLVESGGGVVQPGRSLRLSCAASGFTFSNYDMAWVRQAPGKGLEWVASIITSGDATYYRDSVKGRFTISRDNSKNTLYLQMNSLRSEDTAVYYCVRHDYYDGSYGFAYWGQGTLVTVSS

SEQ ID NO: 28 - protein, 107 aa, Artificial Sequence
  Synthetic Polypeptide
EIVMTQSPATLSVSPGERVTLSCKASQSVGINVDWYQQKPGQAPRLLIYGASNRHTGIPARFSGSGSGTEFTLTISSLQSEDFAVYYCLQYGSIPFTFGPGTKVDIK

SEQ ID NO: 29 - protein, 243 aa, Artificial Sequence
  Synthetic Polypeptide
QVQLVESGGGVVQPGRSLRLSCAASGFTFSNYDMAWVRQAPGKGLEWVASIITSGDATYYRDSVKGRFTISRDNSKNTLYLQMNSLRSEDTAVYYCVRHDYYDGSYGFAYWGQGTLVTVSSGGGGSGGGGSGGGGSEIVMTQSPATLSVSPGERVTLSCKASQSVGINVDWYQQKPGQAPRLLIYGASNRHTGIPARFSGSGSGTEFTLTISSLQSEDFAVYYCLQYGSIPFTFGPGTKVDIK

SEQ ID NO: 30 - protein, 498 aa, Artificial Sequence
  Synthetic Polypeptide
QVQLVESGGGVVQPGRSLRLSCAASGFTFSNYDMAWVRQAPGKGLEWVASIITSGDATYYRDSVKGRFTISRDNSKNTLYLQMNSLRSEDTAVYYCVRHDYYDGSYGFAYWGQGTLVTVSSGGGGSGGGGSGGGGSEIVMTQSPATLSVSPGERVTLSCKASQSVGINVDWYQQKPGQAPRLLIYGASNRHTGIPARFSGSGSGTEFTLTISSLQSEDFAVYYCLQYGSIPFTFGPGTKVDIKSGGGGSEVQLVESGGGLVQPGGSLKLSCAASGFTFNKYAMNWVRQAPGKGLEWVARIRSKYNNYATYYADSVKDRFTISRDDSKNTAYLQMNNLKTEDTAVYYCVRHGNFGNSYISYWAYWGQGTLVTVSSGGGGSGGGGSGGGGSQTVVTQEPSLTVSPGGTVTLTCGSSTGAVTSGNYPNWVQQKPGQAPRGLIGGTKFLAPGTPARFSGSLLGGKAALTLSGVQPEDEAEYYCVLWYSNRWVFGGGTKLTVL

SEQ ID NO: 31 - protein, 5 aa, Artificial Sequence
  Synthetic Polypeptide
NYDMA

SEQ ID NO: 32 - protein, 17 aa, Artificial Sequence
  Synthetic Polypeptide
SIITSGDMTYYRDSVKG

SEQ ID NO: 33 - protein, 12 aa, Artificial Sequence
  Synthetic Polypeptide
HDYYDGSYGFAY

SEQ ID NO: 34 - protein, 11 aa, Artificial Sequence
  Synthetic Polypeptide
KASQSVGINVD

SEQ ID NO: 35 - protein, 7 aa, Artificial Sequence
  Synthetic Polypeptide
GASNRHT

SEQ ID NO: 36 - protein, 9 aa, Artificial Sequence
  Synthetic Polypeptide
LQYGSIPFT

SEQ ID NO: 37 - protein, 121 aa, Artificial Sequence
  Synthetic Polypeptide
QVQLVESGGGVVQPGRSLRLSCAASGFTFSNYDMAWVRQAPGKGLEWVASIITSGDMTYYRDSVKGRFTISRDNSKNTLYLQMNSLRSEDTAVYYCVRHDYYDGSYGFAYWGQGTLVTVSS

SEQ ID NO: 38 - protein, 107 aa, Artificial Sequence; identical to SEQ ID NO: 28
  Synthetic Polypeptide

SEQ ID NO: 39 - protein, 243 aa, Artificial Sequence
  Synthetic Polypeptide
QVQLVESGGGVVQPGRSLRLSCAASGFTFSNYDMAWVRQAPGKGLEWVASIITSGDMTYYRDSVKGRFTISRDNSKNTLYLQMNSLRSEDTAVYYCVRHDYYDGSYGFAYWGQGTLVTVSSGGGGSGGGGSGGGGSEIVMTQSPATLSVSPGERVTLSCKASQSVGINVDWYQQKPGQAPRLLIYGASNRHTGIPARFSGSGSGTEFTLTISSLQSEDFAVYYCLQYGSIPFTFGPGTKVDIK

SEQ ID NO: 40 - protein, 498 aa, Artificial Sequence
  Synthetic Polypeptide
QVQLVESGGGVVQPGRSLRLSCAASGFTFSNYDMAWVRQAPGKGLEWVASIITSGDMTYYRDSVKGRFTISRDNSKNTLYLQMNSLRSEDTAVYYCVRHDYYDGSYGFAYWGQGTLVTVSSGGGGSGGGGSGGGGSEIVMTQSPATLSVSPGERVTLSCKASQSVGINVDWYQQKPGQAPRLLIYGASNRHTGIPARFSGSGSGTEFTLTISSLQSEDFAVYYCLQYGSIPFTFGPGTKVDIKSGGGGSEVQLVESGGGLVQPGGSLKLSCAASGFTFNKYAMNWVRQAPGKGLEWVARIRSKYNNYATYYADSVKDRFTISRDDSKNTAYLQMNNLKTEDTAVYYCVRHGNFGNSYISYWAYWGQGTLVTVSSGGGGSGGGGSGGGGSQTVVTQEPSLTVSPGGTVTLTCGSSTGAVTSGNYPNWVQQKPGQAPRGLIGGTKFLAPGTPARFSGSLLGGKAALTLSGVQPEDEAEYYCVLWYSNRWVFGGGTKLTVL

SEQ ID NO: 41 - protein, 5 aa, Artificial Sequence
  Synthetic Polypeptide
NYDMA

SEQ ID NO: 42 - protein, 17 aa, Artificial Sequence
  Synthetic Polypeptide
SIITSGDATYYRDSVKG

SEQ ID NO: 43 - protein, 12 aa, Artificial Sequence
  Synthetic Polypeptide
HDYYDGSYGFAY

SEQ ID NO: 44 - protein, 11 aa, Artificial Sequence
  Synthetic Polypeptide
KASQSVGINVD

SEQ ID NO: 45 - protein, 7 aa, Artificial Sequence
  Synthetic Polypeptide
GASNRHT

SEQ ID NO: 46 - protein, 9 aa, Artificial Sequence
  Synthetic Polypeptide
LQYGSIPFT

SEQ ID NO: 47 - protein, 121 aa, Artificial Sequence
  Synthetic Polypeptide
QVQLVESGGGVVQPGRSLRLSCAASGFTFSNYDMAWVRQAPGKGLEWVASIITSGDATYYRDSVKGRFTISRDNAKNTLYLQMNSLRAEDTAVYYCVRHDYYDGSYGFAYWGQGTLVTVSS

SEQ ID NO: 48 - protein, 107 aa, Artificial Sequence
  Synthetic Polypeptide
EIVMTQSPASMSVSPGERATLSCKASQSVGINVDWYQQKPGQAPRLLIYGASNRHTGIPARFSGSGSGTEFTLTISSLQSEDFAVYYCLQYGSIPFTFGPGTKVDIK

SEQ ID NO: 49 - protein, 243 aa, Artificial Sequence
  Synthetic Polypeptide
QVQLVESGGGVVQPGRSLRLSCAASGFTFSNYDMAWVRQAPGKGLEWVASIITSGDATYYRDSVKGRFTISRDNAKNTLYLQMNSLRAEDTAVYYCVRHDYYDGSYGFAYWGQGTLVTVSSGGGGSGGGGSGGGGSEIVMTQSPASMSVSPGERATLSCKASQSVGINVDWYQQKPGQAPRLLIYGASNRHTGIPARFSGSGSGTEFTLTISSLQSEDFAVYYCLQYGSIPFTFGPGTKVDIK

SEQ ID NO: 50 - protein, 498 aa, Artificial Sequence
  Synthetic Polypeptide
QVQLVESGGGVVQPGRSLRLSCAASGFTFSNYDMAWVRQAPGKGLEWVASIITSGDATYYRDSVKGRFTISRDNAKNTLYLQMNSLRAEDTAVYYCVRHDYYDGSYGFAYWGQGTLVTVSSGGGGSGGGGSGGGGSEIVMTQSPASMSVSPGERATLSCKASQSVGINVDWYQQKPGQAPRLLIYGASNRHTGIPARFSGSGSGTEFTLTISSLQSEDFAVYYCLQYGSIPFTFGPGTKVDIKSGGGGSEVQLVESGGGLVQPGGSLKLSCAASGFTFNKYAMNWVRQAPGKGLEWVARIRSKYNNYATYYADSVKDRFTISRDDSKNTAYLQMNNLKTEDTAVYYCVRHGNFGNSYISYWAYWGQGTLVTVSSGGGGSGGGGSGGGGSQTVVTQEPSLTVSPGGTVTLTCGSSTGAVTSGNYPNWVQQKPGQAPRGLIGGTKFLAPGTPARFSGSLLGGKAALTLSGVQPEDEAEYYCVLWYSNRWVFGGGTKLTVL

SEQ ID NO: 51 - protein, 5 aa, Artificial Sequence
  Synthetic Polypeptide
NYDMA

SEQ ID NO: 52 - protein, 17 aa, Artificial Sequence
  Synthetic Polypeptide
SIITSGDMTYYRDSVKG

SEQ ID NO: 53 - protein, 12 aa, Artificial Sequence
  Synthetic Polypeptide
HDYYDGSYGFAY

SEQ ID NO: 54 - protein, 11 aa, Artificial Sequence
  Synthetic Polypeptide
KASQSVGINVD

SEQ ID NO: 55 - protein, 7 aa, Artificial Sequence
  Synthetic Polypeptide
GASNRHT

SEQ ID NO: 56 - protein, 9 aa, Artificial Sequence
  Synthetic Polypeptide
LQYGSIPFT

SEQ ID NO: 57 - protein, 121 aa, Artificial Sequence
  Synthetic Polypeptide
QVQLVESGGGVVQPGRSLRLSCAASGFTFSNYDMAWVRQAPGKGLEWVASIITSGDMTYYRDSVKGRFTISRDNAKNTLYLQMNSLRAEDTAVYYCVRHDYYDGSYGFAYWGQGTLVTVSS

SEQ ID NO: 58 - protein, 107 aa, Artificial Sequence; identical to SEQ ID NO: 48
  Synthetic Polypeptide

SEQ ID NO: 59 - protein, 243 aa, Artificial Sequence
  Synthetic Polypeptide
QVQLVESGGGVVQPGRSLRLSCAASGFTFSNYDMAWVRQAPGKGLEWVASIITSGDMTYYRDSVKGRFTISRDNAKNTLYLQMNSLRAEDTAVYYCVRHDYYDGSYGFAYWGQGTLVTVSSGGGGSGGGGSGGGGSEIVMTQSPASMSVSPGERATLSCKASQSVGINVDWYQQKPGQAPRLLIYGASNRHTGIPARFSGSGSGTEFTLTISSLQSEDFAVYYCLQYGSIPFTFGPGTKVDIK

SEQ ID NO: 60 - protein, 498 aa, Artificial Sequence
  Synthetic Polypeptide
QVQLVESGGGVVQPGRSLRLSCAASGFTFSNYDMAWVRQAPGKGLEWVASIITSGDMTYYRDSVKGRFTISRDNAKNTLYLQMNSLRAEDTAVYYCVRHDYYDGSYGFAYWGQGTLVTVSSGGGGSGGGGSGGGGSEIVMTQSPASMSVSPGERATLSCKASQSVGINVDWYQQKPGQAPRLLIYGASNRHTGIPARFSGSGSGTEFTLTISSLQSEDFAVYYCLQYGSIPFTFGPGTKVDIKSGGGGSEVQLVESGGGLVQPGGSLKLSCAASGFTFNKYAMNWVRQAPGKGLEWVARIRSKYNNYATYYADSVKDRFTISRDDSKNTAYLQMNNLKTEDTAVYYCVRHGNFGNSYISYWAYWGQGTLVTVSSGGGGSGGGGSGGGGSQTVVTQEPSLTVSPGGTVTLTCGSSTGAVTSGNYPNWVQQKPGQAPRGLIGGTKFLAPGTPARFSGSLLGGKAALTLSGVQPEDEAEYYCVLWYSNRWVFGGGTKLTVL

SEQ ID NO: 61 - protein, 5 aa, Artificial Sequence
  Synthetic Polypeptide
NYDMA

SEQ ID NO: 62 - protein, 17 aa, Artificial Sequence
  Synthetic Polypeptide
SIITSGDATYYRDSVKG

SEQ ID NO: 63 - protein, 12 aa, Artificial Sequence
  Synthetic Polypeptide
HDYYDGSYGFAY

SEQ ID NO: 64 - protein, 11 aa, Artificial Sequence
  Synthetic Polypeptide
KASQSVGINVD

SEQ ID NO: 65 - protein, 7 aa, Artificial Sequence
  Synthetic Polypeptide
GASNRHT

SEQ ID NO: 66 - protein, 9 aa, Artificial Sequence
  Synthetic Polypeptide
LQYGSIPFT

SEQ ID NO: 67 - protein, 121 aa, Artificial Sequence
  Synthetic Polypeptide
QVQLVESGGGVVQPGRSLRLSCAASGFTFSNYDMAWVRQAPGKGLEWVASIITSGDATYYRDSVKGRFTVSRDNSKNTLYLQMNSLRAEDTAVYYCVRHDYYDGSYGFAYWGQGTLVTVSS

SEQ ID NO: 68 - protein, 107 aa, Artificial Sequence
  Synthetic Polypeptide
EIVMTQSPATLSVSPGERATLSCKASQSVGINVDWYQQKPGQAPRLLIYGASNRHTGIPARFSGSGSGTEFTLTISSLQAEDFAVYYCLQYGSIPFTFGPGTKVDIK

SEQ ID NO: 69 - protein, 243 aa, Artificial Sequence
  Synthetic Polypeptide
QVQLVESGGGVVQPGRSLRLSCAASGFTFSNYDMAWVRQAPGKGLEWVASIITSGDATYYRDSVKGRFTVSRDNSKNTLYLQMNSLRAEDTAVYYCVRHDYYDGSYGFAYWGQGTLVTVSSGGGGSGGGGSGGGGSEIVMTQSPATLSVSPGERATLSCKASQSVGINVDWYQQKPGQAPRLLIYGASNRHTGIPARFSGSGSGTEFTLTISSLQAEDFAVYYCLQYGSIPFTFGPGTKVDIK

SEQ ID NO: 70 - protein, 498 aa, Artificial Sequence
  Synthetic Polypeptide
QVQLVESGGGVVQPGRSLRLSCAASGFTFSNYDMAWVRQAPGKGLEWVASIITSGDATYYRDSVKGRFTVSRDNSKNTLYLQMNSLRAEDTAVYYCVRHDYYDGSYGFAYWGQGTLVTVSSGGGGSGGGGSGGGGSEIVMTQSPATLSVSPGERATLSCKASQSVGINVDWYQQKPGQAPRLLIYGASNRHTGIPARFSGSGSGTEFTLTISSLQAEDFAVYYCLQYGSIPFTFGPGTKVDIKSGGGGSEVQLVESGGGLVQPGGSLKLSCAASGFTFNKYAMNWVRQAPGKGLEWVARIRSKYNNYATYYADSVKDRFTISRDDSKNTAYLQMNNLKTEDTAVYYCVRHGNFGNSYISYWAYWGQGTLVTVSSGGGGSGGGGSGGGGSQTVVTQEPSLTVSPGGTVTLTCGSSTGAVTSGNYPNWVQQKPGQAPRGLIGGTKFLAPGTPARFSGSLLGGKAALTLSGVQPEDEAEYYCVLWYSNRWVFGGGTKLTVL

SEQ ID NO: 71 - protein, 5 aa, Artificial Sequence
  Synthetic Polypeptide
NYDMA

SEQ ID NO: 72 - protein, 17 aa, Artificial Sequence
  Synthetic Polypeptide
SIITSGDMTYYRDSVKG

SEQ ID NO: 73 - protein, 12 aa, Artificial Sequence
  Synthetic Polypeptide
HDYYDGSYGFAY

SEQ ID NO: 74 - protein, 11 aa, Artificial Sequence
  Synthetic Polypeptide
KASQSVGINVD

SEQ ID NO: 75 - protein, 7 aa, Artificial Sequence
  Synthetic Polypeptide
GASNRHT

SEQ ID NO: 76 - protein, 9 aa, Artificial Sequence
  Synthetic Polypeptide
LQYGSIPFT

SEQ ID NO: 77 - protein, 121 aa, Artificial Sequence
  Synthetic Polypeptide
QVQLVESGGGVVQPGRSLRLSCAASGFTFSNYDMAWVRQAPGKGLEWVASIITSGDMTYYRDSVKGRFTVSRDNSKNTLYLQMNSLRAEDTAVYYCVRHDYYDGSYGFAYWGQGTLVTVSS

SEQ ID NO: 78 - protein, 107 aa, Artificial Sequence; identical to SEQ ID NO: 68
  Synthetic Polypeptide

SEQ ID NO: 79 - protein, 243 aa, Artificial Sequence
  Synthetic Polypeptide
QVQLVESGGGVVQPGRSLRLSCAASGFTFSNYDMAWVRQAPGKGLEWVASIITSGDMTYYRDSVKGRFTVSRDNSKNTLYLQMNSLRAEDTAVYYCVRHDYYDGSYGFAYWGQGTLVTVSSGGGGSGGGGSGGGGSEIVMTQSPATLSVSPGERATLSCKASQSVGINVDWYQQKPGQAPRLLIYGASNRHTGIPARFSGSGSGTEFTLTISSLQAEDFAVYYCLQYGSIPFTFGPGTKVDIK

SEQ ID NO: 80 - protein, 498 aa, Artificial Sequence
  Synthetic Polypeptide
QVQLVESGGGVVQPGRSLRLSCAASGFTFSNYDMAWVRQAPGKGLEWVASIITSGDMTYYRDSVKGRFTVSRDNSKNTLYLQMNSLRAEDTAVYYCVRHDYYDGSYGFAYWGQGTLVTVSSGGGGSGGGGSGGGGSEIVMTQSPATLSVSPGERATLSCKASQSVGINVDWYQQKPGQAPRLLIYGASNRHTGIPARFSGSGSGTEFTLTISSLQAEDFAVYYCLQYGSIPFTFGPGTKVDIKSGGGGSEVQLVESGGGLVQPGGSLKLSCAASGFTFNKYAMNWVRQAPGKGLEWVARIRSKYNNYATYYADSVKDRFTISRDDSKNTAYLQMNNLKTEDTAVYYCVRHGNFGNSYISYWAYWGQGTLVTVSSGGGGSGGGGSGGGGSQTVVTQEPSLTVSPGGTVTLTCGSSTGAVTSGNYPNWVQQKPGQAPRGLIGGTKFLAPGTPARFSGSLLGGKAALTLSGVQPEDEAEYYCVLWYSNRWVFGGGTKLTVL

SEQ ID NO: 81 - protein, 5 aa, Artificial Sequence
  Synthetic Polypeptide
NFDMA

SEQ ID NO: 82 - protein, 17 aa, Artificial Sequence
  Synthetic Polypeptide
SITTGADHAIYADSVKG

SEQ ID NO: 83 - protein, 12 aa, Artificial Sequence
  Synthetic Polypeptide
HGYYDGYHLFDY

SEQ ID NO: 84 - protein, 11 aa, Artificial Sequence
  Synthetic Polypeptide
RASQGISNYLN

SEQ ID NO: 85 - protein, 7 aa, Artificial Sequence
  Synthetic Polypeptide
YTSNLQS

SEQ ID NO: 86 - protein, 9 aa, Artificial Sequence
  Synthetic Polypeptide
QQYDISSYT

SEQ ID NO: 87 - protein, 121 aa, Artificial Sequence
  Synthetic Polypeptide
EVQLVESGGGLVQPGGSLRLSCAASGFTFSNFDMAWVRQAPGKGLVWVSSITTGADHAIYADSVKGRFTISRDNAKNTLYLQMDSLRAEDTAVYYCVRHGYYDGYHLFDYWGQGTLVTVSS

SEQ ID NO: 88 - protein, 107 aa, Artificial Sequence
  Synthetic Polypeptide
DIQMTQSPSSLSASVGDRVTITCRASQGISNYLNWYQQKPGKAPKPLIYYTSNLQSGVPSRFSGSGSGTDYTLTISSLQPEDFATYYCQQYDISSYTFGQGTKLEIK

SEQ ID NO: 89 - protein, 243 aa, Artificial Sequence
  Synthetic Polypeptide
EVQLVESGGGLVQPGGSLRLSCAASGFTFSNFDMAWVRQAPGKGLVWVSSITTGADHAIYADSVKGRFTISRDNAKNTLYLQMDSLRAEDTAVYYCVRHGYYDGYHLFDYWGQGTLVTVSSGGGGSGGGGSGGGGSDIQMTQSPSSLSASVGDRVTITCRASQGISNYLNWYQQKPGKAPKPLIYYTSNLQSGVPSRFSGSGSGTDYTLTISSLQPEDFATYYCQQYDISSYTFGQGTKLEIK

SEQ ID NO: 90 - protein, 498 aa, Artificial Sequence
  Synthetic Polypeptide
EVQLVESGGGLVQPGGSLRLSCAASGFTFSNFDMAWVRQAPGKGLVWVSSITTGADHAIYADSVKGRFTISRDNAKNTLYLQMDSLRAEDTAVYYCVRHGYYDGYHLFDYWGQGTLVTVSSGGGGSGGGGSGGGGSDIQMTQSPSSLSASVGDRVTITCRASQGISNYLNWYQQKPGKAPKPLIYYTSNLQSGVPSRFSGSGSGTDYTLTISSLQPEDFATYYCQQYDISSYTFGQGTKLEIKSGGGGSEVQLVESGGGLVQPGGSLKLSCAASGFTFNKYAMNWVRQAPGKGLEWVARIRSKYNNYATYYADSVKDRFTISRDDSKNTAYLQMNNLKTEDTAVYYCVRHGNFGNSYISYWAYWGQGTLVTVSSGGGGSGGGGSGGGGSQTVVTQEPSLTVSPGGTVTLTCGSSTGAVTSGNYPNWVQQKPGQAPRGLIGGTKFLAPGTPARFSGSLLGGKAALTLSGVQPEDEAEYYCVLWYSNRWVFGGGTKLTVL

SEQ ID NO: 91 - protein, 5 aa, Artificial Sequence
  Synthetic Polypeptide
NFDMA

SEQ ID NO: 92 - protein, 17 aa, Artificial Sequence
  Synthetic Polypeptide
SITTGADHAIYADSVKG

SEQ ID NO: 93 - protein, 12 aa, Artificial Sequence
  Synthetic Polypeptide
HGYYDGYHLFDY

SEQ ID NO: 94 - protein, 11 aa, Artificial Sequence
  Synthetic Polypeptide
RASQGISNYLN

SEQ ID NO: 95 - protein, 7 aa, Artificial Sequence
  Synthetic Polypeptide
YTSNLQS

SEQ ID NO: 96 - protein, 9 aa, Artificial Sequence
  Synthetic Polypeptide
MGQTISSYT

SEQ ID NO: 97 - protein, 121 aa, Artificial Sequence; identical to SEQ ID NO: 87
  Synthetic Polypeptide

SEQ ID NO: 98 - protein, 107 aa, Artificial Sequence
  Synthetic Polypeptide
DIQMTQSPSSLSASVGDRVTITCRASQGISNYLNWYQQKPGKAPKPLIYYTSNLQSGVPSRFSGSGSGTDYTLTISSLQPEDFATYYCMGQTISSYTFGQGTKLEIK

SEQ ID NO: 99 - protein, 243 aa, Artificial Sequence
  Synthetic Polypeptide
EVQLVESGGGLVQPGGSLRLSCAASGFTFSNFDMAWVRQAPGKGLVWVSSITTGADHAIYADSVKGRFTISRDNAKNTLYLQMDSLRAEDTAVYYCVRHGYYDGYHLFDYWGQGTLVTVSSGGGGSGGGGSGGGGSDIQMTQSPSSLSASVGDRVTITCRASQGISNYLNWYQQKPGKAPKPLIYYTSNLQSGVPSRFSGSGSGTDYTLTISSLQPEDFATYYCMGQTISSYTFGQGTKLEIK

SEQ ID NO: 100 - protein, 498 aa, Artificial Sequence
  Synthetic Polypeptide
EVQLVESGGGLVQPGGSLRLSCAASGFTFSNFDMAWVRQAPGKGLVWVSSITTGADHAIYADSVKGRFTISRDNAKNTLYLQMDSLRAEDTAVYYCVRHGYYDGYHLFDYWGQGTLVTVSSGGGGSGGGGSGGGGSDIQMTQSPSSLSASVGDRVTITCRASQGISNYLNWYQQKPGKAPKPLIYYTSNLQSGVPSRFSGSGSGTDYTLTISSLQPEDFATYYCMGQTISSYTFGQGTKLEIKSGGGGSEVQLVESGGGLVQPGGSLKLSCAASGFTFNKYAMNWVRQAPGKGLEWVARIRSKYNNYATYYADSVKDRFTISRDDSKNTAYLQMNNLKTEDTAVYYCVRHGNFGNSYISYWAYWGQGTLVTVSSGGGGSGGGGSGGGGSQTVVTQEPSLTVSPGGTVTLTCGSSTGAVTSGNYPNWVQQKPGQAPRGLIGGTKFLAPGTPARFSGSLLGGKAALTLSGVQPEDEAEYYCVLWYSNRWVFGGGTKLTVL

SEQ ID NO: 101 - protein, 5 aa, Artificial Sequence
  Synthetic Polypeptide
NFDMA

SEQ ID NO: 102 - protein, 17 aa, Artificial Sequence
  Synthetic Polypeptide
SITTGADHAIYADSVKG

SEQ ID NO: 103 - protein, 12 aa, Artificial Sequence
  Synthetic Polypeptide
HGYYDGYHLFDY

SEQ ID NO: 104 - protein, 11 aa, Artificial Sequence
  Synthetic Polypeptide
RASQGISNYLN

SEQ ID NO: 105 - protein, 7 aa, Artificial Sequence
  Synthetic Polypeptide
YTSNLQS

SEQ ID NO: 106 - protein, 9 aa, Artificial Sequence
  Synthetic Polypeptide
QQYDISSYT

SEQ ID NO: 107 - protein, 121 aa, Artificial Sequence
  Synthetic Polypeptide
EVQLVESGGGLVQPGGSLRLSCAASGFTFSNFDMAWVRQAPGKGLVWVSSITTGADHAIYADSVKGRFTISRDNAKNTLYLQMNSLRAEDTAVYYCVRHGYYDGYHLFDYWGQGTLVTVSS

SEQ ID NO: 108 - protein, 107 aa, Artificial Sequence; identical to SEQ ID NO: 88
  Synthetic Polypeptide

SEQ ID NO: 109 - protein, 243 aa, Artificial Sequence
  Synthetic Polypeptide
EVQLVESGGGLVQPGGSLRLSCAASGFTFSNFDMAWVRQAPGKGLVWVSSITTGADHAIYADSVKGRFTISRDNAKNTLYLQMNSLRAEDTAVYYCVRHGYYDGYHLFDYWGQGTLVTVSSGGGGSGGGGSGGGGSDIQMTQSPSSLSASVGDRVTITCRASQGISNYLNWYQQKPGKAPKPLIYYTSNLQSGVPSRFSGSGSGTDYTLTISSLQPEDFATYYCQQYDISSYTFGQGTKLEIK

SEQ ID NO: 110 - protein, 498 aa, Artificial Sequence
  Synthetic Polypeptide
EVQLVESGGGLVQPGGSLRLSCAASGFTFSNFDMAWVRQAPGKGLVWVSSITTGADHAIYADSVKGRFTISRDNAKNTLYLQMNSLRAEDTAVYYCVRHGYYDGYHLFDYWGQGTLVTVSSGGGGSGGGGSGGGGSDIQMTQSPSSLSASVGDRVTITCRASQGISNYLNWYQQKPGKAPKPLIYYTSNLQSGVPSRFSGSGSGTDYTLTISSLQPEDFATYYCQQYDISSYTFGQGTKLEIKSGGGGSEVQLVESGGGLVQPGGSLKLSCAASGFTFNKYAMNWVRQAPGKGLEWVARIRSKYNNYATYYADSVKDRFTISRDDSKNTAYLQMNNLKTEDTAVYYCVRHGNFGNSYISYWAYWGQGTLVTVSSGGGGSGGGGSGGGGSQTVVTQEPSLTVSPGGTVTLTCGSSTGAVTSGNYPNWVQQKPGQAPRGLIGGTKFLAPGTPARFSGSLLGGKAALTLSGVQPEDEAEYYCVLWYSNRWVFGGGTKLTVL

SEQ ID NO: 111 - protein, 5 aa, Artificial Sequence
  Synthetic Polypeptide
NFDMA

SEQ ID NO: 112 - protein, 17 aa, Artificial Sequence
  Synthetic Polypeptide
SITTGADHAIYADSVKG

SEQ ID NO: 113 - protein, 12 aa, Artificial Sequence
  Synthetic Polypeptide
HGYYDGYHLFDY

SEQ ID NO: 114 - protein, 11 aa, Artificial Sequence
  Synthetic Polypeptide
RASQGISNYLN

SEQ ID NO: 115 - protein, 7 aa, Artificial Sequence
  Synthetic Polypeptide
YTSNLQS

SEQ ID NO: 116 - protein, 9 aa, Artificial Sequence
  Synthetic Polypeptide
MGQTISSYT

SEQ ID NO: 117 - protein, 121 aa, Artificial Sequence; identical to SEQ ID NO: 107
  Synthetic Polypeptide

SEQ ID NO: 118 - protein, 107 aa, Artificial Sequence; identical to SEQ ID NO: 98
  Synthetic Polypeptide

SEQ ID NO: 119 - protein, 243 aa, Artificial Sequence
  Synthetic Polypeptide
EVQLVESGGGLVQPGGSLRLSCAASGFTFSNFDMAWVRQAPGKGLVWVSSITTGADHAIYADSVKGRFTISRDNAKNTLYLQMNSLRAEDTAVYYCVRHGYYDGYHLFDYWGQGTLVTVSSGGGGSGGGGSGGGGSDIQMTQSPSSLSASVGDRVTITCRASQGISNYLNWYQQKPGKAPKPLIYYTSNLQSGVPSRFSGSGSGTDYTLTISSLQPEDFATYYCMGQTISSYTFGQGTKLEIK

SEQ ID NO: 120 - protein, 498 aa, Artificial Sequence
  Synthetic Polypeptide
EVQLVESGGGLVQPGGSLRLSCAASGFTFSNFDMAWVRQAPGKGLVWVSSITTGADHAIYADSVKGRFTISRDNAKNTLYLQMNSLRAEDTAVYYCVRHGYYDGYHLFDYWGQGTLVTVSSGGGGSGGGGSGGGGSDIQMTQSPSSLSASVGDRVTITCRASQGISNYLNWYQQKPGKAPKPLIYYTSNLQSGVPSRFSGSGSGTDYTLTISSLQPEDFATYYCMGQTISSYTFGQGTKLEIKSGGGGSEVQLVESGGGLVQPGGSLKLSCAASGFTFNKYAMNWVRQAPGKGLEWVARIRSKYNNYATYYADSVKDRFTISRDDSKNTAYLQMNNLKTEDTAVYYCVRHGNFGNSYISYWAYWGQGTLVTVSSGGGGSGGGGSGGGGSQTVVTQEPSLTVSPGGTVTLTCGSSTGAVTSGNYPNWVQQKPGQAPRGLIGGTKFLAPGTPARFSGSLLGGKAALTLSGVQPEDEAEYYCVLWYSNRWVFGGGTKLTVL

SEQ ID NO: 121 - protein, 5 aa, Artificial Sequence
  Synthetic Polypeptide
NFDMA

SEQ ID NO: 122 - protein, 17 aa, Artificial Sequence
  Synthetic Polypeptide
SITTGADHAIYADSVKG

SEQ ID NO: 123 - protein, 12 aa, Artificial Sequence
  Synthetic Polypeptide
HGYYDGYHLFDY

SEQ ID NO: 124 - protein, 11 aa, Artificial Sequence
  Synthetic Polypeptide
RASQGISNYLN

SEQ ID NO: 125 - protein, 7 aa, Artificial Sequence
  Synthetic Polypeptide
YTSNLQS

SEQ ID NO: 126 - protein, 9 aa, Artificial Sequence
  Synthetic Polypeptide
QQYDISSYT

SEQ ID NO: 127 - protein, 121 aa, Artificial Sequence
  Synthetic Polypeptide
EVQLVESGGGLVQPGGSLRLSCAASGFTFSNFDMAWVRQAPGKGLVWVSSITTGADHAIYADSVKGRFTISRDNAKNTLYLQMDSLRSEDTAVYYCVRHGYYDGYHLFDYWGQGTLVTVSS

SEQ ID NO: 128 - protein, 107 aa, Artificial Sequence
  Synthetic Polypeptide
DIQMTQSPSSLSASVGDRVTISCRASQGISNYLNWYQQKPGKAPKPLIYYTSNLQSGVPSRFSGSGSGTDYTLTISSLQPEDFATYYCQQYDISSYTFGQGTKLEIK

SEQ ID NO: 129 - protein, 243 aa, Artificial Sequence
  Synthetic Polypeptide
EVQLVESGGGLVQPGGSLRLSCAASGFTFSNFDMAWVRQAPGKGLVWVSSITTGADHAIYADSVKGRFTISRDNAKNTLYLQMDSLRSEDTAVYYCVRHGYYDGYHLFDYWGQGTLVTVSSGGGGSGGGGSGGGGSDIQMTQSPSSLSASVGDRVTISCRASQGISNYLNWYQQKPGKAPKPLIYYTSNLQSGVPSRFSGSGSGTDYTLTISSLQPEDFATYYCQQYDISSYTFGQGTKLEIK

SEQ ID NO: 130 - protein, 498 aa, Artificial Sequence
  Synthetic Polypeptide
EVQLVESGGGLVQPGGSLRLSCAASGFTFSNFDMAWVRQAPGKGLVWVSSITTGADHAIYADSVKGRFTISRDNAKNTLYLQMDSLRSEDTAVYYCVRHGYYDGYHLFDYWGQGTLVTVSSGGGGSGGGGSGGGGSDIQMTQSPSSLSASVGDRVTISCRASQGISNYLNWYQQKPGKAPKPLIYYTSNLQSGVPSRFSGSGSGTDYTLTISSLQPEDFATYYCQQYDISSYTFGQGTKLEIKSGGGGSEVQLVESGGGLVQPGGSLKLSCAASGFTFNKYAMNWVRQAPGKGLEWVARIRSKYNNYATYYADSVKDRFTISRDDSKNTAYLQMNNLKTEDTAVYYCVRHGNFGNSYISYWAYWGQGTLVTVSSGGGGSGGGGSGGGGSQTVVTQEPSLTVSPGGTVTLTCGSSTGAVTSGNYPNWVQQKPGQAPRGLIGGTKFLAPGTPARFSGSLLGGKAALTLSGVQPEDEAEYYCVLWYSNRWVFGGGTKLTVL

SEQ ID NO: 131 - protein, 5 aa, Artificial Sequence
  Synthetic Polypeptide
NFDMA

SEQ ID NO: 132 - protein, 17 aa, Artificial Sequence
  Synthetic Polypeptide
SITTGADHAIYAESVKG

SEQ ID NO: 133 - protein, 12 aa, Artificial Sequence
  Synthetic Polypeptide
HGYYDGYHLFDY

SEQ ID NO: 134 - protein, 11 aa, Artificial Sequence
  Synthetic Polypeptide
RASQGISNYLN

SEQ ID NO: 135 - protein, 7 aa, Artificial Sequence
  Synthetic Polypeptide
YTSNLQS

SEQ ID NO: 136 - protein, 9 aa, Artificial Sequence
  Synthetic Polypeptide
MGQTISSYT

SEQ ID NO: 137 - protein, 121 aa, Artificial Sequence
  Synthetic Polypeptide
EVQLVESGGGLVQPGGSLRLSCAASGFTFSNFDMAWVRQAPGKGLVWVSSITTGADHAIYAESVKGRFTISRDNAKNTLYLQMDSLRSEDTAVYYCVRHGYYDGYHLFDYWGQGTLVTVSS

SEQ ID NO: 138 - protein, 107 aa, Artificial Sequence
  Synthetic Polypeptide
DIQMTQSPSSLSASVGDRVTISCRASQGISNYLNWYQQKPGKAPKPLIYYTSNLQSGVPSRFSGSGSGTDYTLTISSLQPEDFATYYCMGQTISSYTFGQGTKLEIK

SEQ ID NO: 139 - protein, 243 aa, Artificial Sequence
  Synthetic Polypeptide
EVQLVESGGGLVQPGGSLRLSCAASGFTFSNFDMAWVRQAPGKGLVWVSSITTGADHAIYAESVKGRFTISRDNAKNTLYLQMDSLRSEDTAVYYCVRHGYYDGYHLFDYWGQGTLVTVSSGGGGSGGGGSGGGGSDIQMTQSPSSLSASVGDRVTISCRASQGISNYLNWYQQKPGKAPKPLIYYTSNLQSGVPSRFSGSGSGTDYTLTISSLQPEDFATYYCMGQTISSYTFGQGTKLEIK

SEQ ID NO: 140 - protein, 498 aa, Artificial Sequence
  Synthetic Polypeptide
EVQLVESGGGLVQPGGSLRLSCAASGFTFSNFDMAWVRQAPGKGLVWVSSITTGADHAIYAESVKGRFTISRDNAKNTLYLQMDSLRSEDTAVYYCVRHGYYDGYHLFDYWGQGTLVTVSSGGGGSGGGGSGGGGSDIQMTQSPSSLSASVGDRVTISCRASQGISNYLNWYQQKPGKAPKPLIYYTSNLQSGVPSRFSGSGSGTDYTLTISSLQPEDFATYYCMGQTISSYTFGQGTKLEIKSGGGGSEVQLVESGGGLVQPGGSLKLSCAASGFTFNKYAMNWVRQAPGKGLEWVARIRSKYNNYATYYADSVKDRFTISRDDSKNTAYLQMNNLKTEDTAVYYCVRHGNFGNSYISYWAYWGQGTLVTVSSGGGGSGGGGSGGGGSQTVVTQEPSLTVSPGGTVTLTCGSSTGAVTSGNYPNWVQQKPGQAPRGLIGGTKFLAPGTPARFSGSLLGGKAALTLSGVQPEDEAEYYCVLWYSNRWVFGGGTKLTVL

SEQ ID NO: 141 - protein, 5 aa, Artificial Sequence
  Synthetic Polypeptide
NFDMA

SEQ ID NO: 142 - protein, 17 aa, Artificial Sequence
  Synthetic Polypeptide
SITTGADHAIYADSVKG

SEQ ID NO: 143 - protein, 12 aa, Artificial Sequence
  Synthetic Polypeptide
HGYYDGYHLFDY

SEQ ID NO: 144 - protein, 11 aa, Artificial Sequence
  Synthetic Polypeptide
RASQGISNYLN

SEQ ID NO: 145 - protein, 7 aa, Artificial Sequence
  Synthetic Polypeptide
YTSNLQS

SEQ ID NO: 146 - protein, 9 aa, Artificial Sequence
  Synthetic Polypeptide
MGQTISSYT

SEQ ID NO: 147 - protein, 121 aa, Artificial Sequence
  Synthetic Polypeptide
EVQLVESGGGLVQPGRSLRLSCAASGFTFSNFDMAWVRQAPAKGLEWVSSITTGADHAIYADSVKGRFTISRDNAKNTLYLQMNSLRAEDTAVYYCVRHGYYDGYHLFDYWGQGTLVTVSS

SEQ ID NO: 148 - protein, 107 aa, Artificial Sequence
  Synthetic Polypeptide
DIQMTQSPSSLSASVGDRVTITCRASQGISNYLNWYQQKPGKAPKPLIYYTSNLQSGVPSRFSGSGSGTDFTLTISSLQPEDFATYYCMGQTISSYTFGQGTKLEIK

SEQ ID NO: 149 - protein, 243 aa, Artificial Sequence
  Synthetic Polypeptide
EVQLVESGGGLVQPGRSLRLSCAASGFTFSNFDMAWVRQAPAKGLEWVSSITTGADHAIYADSVKGRFTISRDNAKNTLYLQMNSLRAEDTAVYYCVRHGYYDGYHLFDYWGQGTLVTVSSGGGGSGGGGSGGGGSDIQMTQSPSSLSASVGDRVTITCRASQGISNYLNWYQQKPGKAPKPLIYYTSNLQSGVPSRFSGSGSGTDFTLTISSLQPEDFATYYCMGQTISSYTFGQGTKLEIK

SEQ ID NO: 150 - protein, 498 aa, Artificial Sequence
  Synthetic Polypeptide
EVQLVESGGGLVQPGRSLRLSCAASGFTFSNFDMAWVRQAPAKGLEWVSSITTGADHAIYADSVKGRFTISRDNAKNTLYLQMNSLRAEDTAVYYCVRHGYYDGYHLFDYWGQGTLVTVSSGGGGSGGGGSGGGGSDIQMTQSPSSLSASVGDRVTITCRASQGISNYLNWYQQKPGKAPKPLIYYTSNLQSGVPSRFSGSGSGTDFTLTISSLQPEDFATYYCMGQTISSYTFGQGTKLEIKSGGGGSEVQLVESGGGLVQPGGSLKLSCAASGFTFNKYAMNWVRQAPGKGLEWVARIRSKYNNYATYYADSVKDRFTISRDDSKNTAYLQMNNLKTEDTAVYYCVRHGNFGNSYISYWAYWGQGTLVTVSSGGGGSGGGGSGGGGSQTVVTQEPSLTVSPGGTVTLTCGSSTGAVTSGNYPNWVQQKPGQAPRGLIGGTKFLAPGTPARFSGSLLGGKAALTLSGVQPEDEAEYYCVLWYSNRWVFGGGTKLTVL

SEQ ID NO: 151 - protein, 5 aa, Artificial Sequence
  Synthetic Polypeptide
NHIIH

SEQ ID NO: 152 - protein, 17 aa, Artificial Sequence
  Synthetic Polypeptide
YINPYPGYHAYNEKFQG

SEQ ID NO: 153 - protein, 12 aa, Artificial Sequence
  Synthetic Polypeptide
DGYYRDTDVLDY

SEQ ID NO: 154 - protein, 11 aa, Artificial Sequence
  Synthetic Polypeptide
QASQDISNYLN

SEQ ID NO: 155 - protein, 7 aa, Artificial Sequence
  Synthetic Polypeptide
YTSRLHT

SEQ ID NO: 156 - protein, 9 aa, Artificial Sequence
  Synthetic Polypeptide
QQGNTLPWT

SEQ ID NO: 157 - protein, 121 aa, Artificial Sequence
  Synthetic Polypeptide
QVQLVQSGAEVKKPGASVKVSCKASGYTFTNHIIHWVRQAPGQGLEWMGYINPYPGYHAYNEKFQGRATMTSDTSTSTVYMELSSLRSEDTAVYYCARDGYYRDTDVLDYWGQGTLVTVSS

SEQ ID NO: 158 - protein, 107 aa, Artificial Sequence
  Synthetic Polypeptide
DIQMTQSPSSLSASLGDRVTITCQASQDISNYLNWYQQKPGKAPKLLIYYTSRLHTGVPSRFSGSGSGTDFTFTISSLQQEDIATYYCQQGNTLPWTFGQGTKVEIK

SEQ ID NO: 159 - protein, 243 aa, Artificial Sequence
  Synthetic Polypeptide
QVQLVQSGAEVKKPGASVKVSCKASGYTFTNHIIHWVRQAPGQGLEWMGYINPYPGYHAYNEKFQGRATMTSDTSTSTVYMELSSLRSEDTAVYYCARDGYYRDTDVLDYWGQGTLVTVSSGGGGSGGGGSGGGGSDIQMTQSPSSLSASLGDRVTITCQASQDISNYLNWYQQKPGKAPKLLIYYTSRLHTGVPSRFSGSGSGTDFTFTISSLQQEDIATYYCQQGNTLPWTFGQGTKVEIK

SEQ ID NO: 160 - protein, 498 aa, Artificial Sequence
  Synthetic Polypeptide
QVQLVQSGAEVKKPGASVKVSCKASGYTFTNHIIHWVRQAPGQGLEWMGYINPYPGYHAYNEKFQGRATMTSDTSTSTVYMELSSLRSEDTAVYYCARDGYYRDTDVLDYWGQGTLVTVSSGGGGSGGGGSGGGGSDIQMTQSPSSLSASLGDRVTITCQASQDISNYLNWYQQKPGKAPKLLIYYTSRLHTGVPSRFSGSGSGTDFTFTISSLQQEDIATYYCQQGNTLPWTFGQGTKVEIKSGGGGSEVQLVESGGGLVQPGGSLKLSCAASGFTFNKYAMNWVRQAPGKGLEWVARIRSKYNNYATYYADSVKDRFTISRDDSKNTAYLQMNNLKTEDTAVYYCVRHGNFGNSYISYWAYWGQGTLVTVSSGGGGSGGGGSGGGGSQTVVTQEPSLTVSPGGTVTLTCGSSTGAVTSGNYPNWVQQKPGQAPRGLIGGTKFLAPGTPARFSGSLLGGKAALTLSGVQPEDEAEYYCVLWYSNRWVFGGGTKLTVL

SEQ ID NO: 161 - protein, 5 aa, Artificial Sequence
  Synthetic Polypeptide
NHIIH

SEQ ID NO: 162 - protein, 17 aa, Artificial Sequence
  Synthetic Polypeptide
YINPYDGWGDYNEKFQG

SEQ ID NO: 163 - protein, 12 aa, Artificial Sequence
  Synthetic Polypeptide
DGYYRDADVLDY

SEQ ID NO: 164 - protein, 11 aa, Artificial Sequence
  Synthetic Polypeptide
QASQDISNYLN

SEQ ID NO: 165 - protein, 7 aa, Artificial Sequence
  Synthetic Polypeptide
YTSRLHT

SEQ ID NO: 166 - protein, 9 aa, Artificial Sequence
  Synthetic Polypeptide
QQGNTLPWT

SEQ ID NO: 167 - protein, 121 aa, Artificial Sequence
  Synthetic Polypeptide
QVQLVQSGAEVKKPGASVKVSCKASGYTFTNHIIHWVRQAPGQGLEWMGYINPYDGWGDYNEKFQGRATMTSDTSTSTVYMELSSLRSEDTAVYYCARDGYYRDADVLDYWGQGTLVTVSS

SEQ ID NO: 168 - protein, 107 aa, Artificial Sequence; identical to SEQ ID NO: 158
  Synthetic Polypeptide

SEQ ID NO: 169 - protein, 243 aa, Artificial Sequence
  Synthetic Polypeptide
QVQLVQSGAEVKKPGASVKVSCKASGYTFTNHIIHWVRQAPGQGLEWMGYINPYDGWGDYNEKFQGRATMTSDTSTSTVYMELSSLRSEDTAVYYCARDGYYRDADVLDYWGQGTLVTVSSGGGGSGGGGSGGGGSDIQMTQSPSSLSASLGDRVTITCQASQDISNYLNWYQQKPGKAPKLLIYYTSRLHTGVPSRFSGSGSGTDFTFTISSLQQEDIATYYCQQGNTLPWTFGQGTKVEIK

SEQ ID NO: 170 - protein, 498 aa, Artificial Sequence
  Synthetic Polypeptide
QVQLVQSGAEVKKPGASVKVSCKASGYTFTNHIIHWVRQAPGQGLEWMGYINPYDGWGDYNEKFQGRATMTSDTSTSTVYMELSSLRSEDTAVYYCARDGYYRDADVLDYWGQGTLVTVSSGGGGSGGGGSGGGGSDIQMTQSPSSLSASLGDRVTITCQASQDISNYLNWYQQKPGKAPKLLIYYTSRLHTGVPSRFSGSGSGTDFTFTISSLQQEDIATYYCQQGNTLPWTFGQGTKVEIKSGGGGSEVQLVESGGGLVQPGGSLKLSCAASGFTFNKYAMNWVRQAPGKGLEWVARIRSKYNNYATYYADSVKDRFTISRDDSKNTAYLQMNNLKTEDTAVYYCVRHGNFGNSYISYWAYWGQGTLVTVSSGGGGSGGGGSGGGGSQTVVTQEPSLTVSPGGTVTLTCGSSTGAVTSGNYPNWVQQKPGQAPRGLIGGTKFLAPGTPARFSGSLLGGKAALTLSGVQPEDEAEYYCVLWYSNRWVFGGGTKLTVL

SEQ ID NO: 171 - protein, 5 aa, Artificial Sequence
  Synthetic Polypeptide
NHIIH

SEQ ID NO: 172 - protein, 17 aa, Artificial Sequence
  Synthetic Polypeptide
YINPYPGYHAYNEKFQG

SEQ ID NO: 173 - protein, 12 aa, Artificial Sequence
  Synthetic Polypeptide
DGYYRDTDVLDY

SEQ ID NO: 174 - protein, 11 aa, Artificial Sequence
  Synthetic Polypeptide
QASQDISNYLN

SEQ ID NO: 175 - protein, 7 aa, Artificial Sequence
  Synthetic Polypeptide
YTSRLHT

SEQ ID NO: 176 - protein, 9 aa, Artificial Sequence
  Synthetic Polypeptide
QQGNTLPWT

SEQ ID NO: 177 - protein, 121 aa, Artificial Sequence; identical to SEQ ID NO: 157
  Synthetic Polypeptide

SEQ ID NO: 178 - protein, 107 aa, Artificial Sequence
  Synthetic Polypeptide
DIQMTQSPSSLSASVGDRVTITCQASQDISNYLNWYQQKPGKAPKLLIYYTSRLHTGVPSRFSGSGSGTDFTFTISSLEPEDIATYYCQQGNTLPWTFGQGTKVEIK

SEQ ID NO: 179 - protein, 243 aa, Artificial Sequence
  Synthetic Polypeptide
QVQLVQSGAEVKKPGASVKVSCKASGYTFTNHIIHWVRQAPGQGLEWMGYINPYPGYHAYNEKFQGRATMTSDTSTSTVYMELSSLRSEDTAVYYCARDGYYRDTDVLDYWGQGTLVTVSSGGGGSGGGGSGGGGSDIQMTQSPSSLSASVGDRVTITCQASQDISNYLNWYQQKPGKAPKLLIYYTSRLHTGVPSRFSGSGSGTDFTFTISSLEPEDIATYYCQQGNTLPWTFGQGTKVEIK

SEQ ID NO: 180 - protein, 498 aa, Artificial Sequence
  Synthetic Polypeptide
QVQLVQSGAEVKKPGASVKVSCKASGYTFTNHIIHWVRQAPGQGLEWMGYINPYPGYHAYNEKFQGRATMTSDTSTSTVYMELSSLRSEDTAVYYCARDGYYRDTDVLDYWGQGTLVTVSSGGGGSGGGGSGGGGSDIQMTQSPSSLSASVGDRVTITCQASQDISNYLNWYQQKPGKAPKLLIYYTSRLHTGVPSRFSGSGSGTDFTFTISSLEPEDIATYYCQQGNTLPWTFGQGTKVEIKSGGGGSEVQLVESGGGLVQPGGSLKLSCAASGFTFNKYAMNWVRQAPGKGLEWVARIRSKYNNYATYYADSVKDRFTISRDDSKNTAYLQMNNLKTEDTAVYYCVRHGNFGNSYISYWAYWGQGTLVTVSSGGGGSGGGGSGGGGSQTVVTQEPSLTVSPGGTVTLTCGSSTGAVTSGNYPNWVQQKPGQAPRGLIGGTKFLAPGTPARFSGSLLGGKAALTLSGVQPEDEAEYYCVLWYSNRWVFGGGTKLTVL

SEQ ID NO: 181 - protein, 5 aa, Artificial Sequence
  Synthetic Polypeptide
NHIIH

SEQ ID NO: 182 - protein, 17 aa, Artificial Sequence
  Synthetic Polypeptide
YINPYDGWGDYNEKFQG

SEQ ID NO: 183 - protein, 12 aa, Artificial Sequence
  Synthetic Polypeptide
DGYYRDADVLDY

SEQ ID NO: 184 - protein, 11 aa, Artificial Sequence
  Synthetic Polypeptide
QASQDISNYLN

SEQ ID NO: 185 - protein, 7 aa, Artificial Sequence
  Synthetic Polypeptide
YTSRLHT

SEQ ID NO: 186 - protein, 9 aa, Artificial Sequence
  Synthetic Polypeptide
QQGNTLPWT

SEQ ID NO: 187 - protein, 121 aa, Artificial Sequence; identical to SEQ ID NO: 167
  Synthetic Polypeptide

SEQ ID NO: 188 - protein, 107 aa, Artificial Sequence; identical to SEQ ID NO: 178
  Synthetic Polypeptide

SEQ ID NO: 189 - protein, 243 aa, Artificial Sequence
  Synthetic Polypeptide
QVQLVQSGAEVKKPGASVKVSCKASGYTFTNHIIHWVRQAPGQGLEWMGYINPYDGWGDYNEKFQGRATMTSDTSTSTVYMELSSLRSEDTAVYYCARDGYYRDADVLDYWGQGTLVTVSSGGGGSGGGGSGGGGSDIQMTQSPSSLSASVGDRVTITCQASQDISNYLNWYQQKPGKAPKLLIYYTSRLHTGVPSRFSGSGSGTDFTFTISSLEPEDIATYYCQQGNTLPWTFGQGTKVEIK

SEQ ID NO: 190 - protein, 498 aa, Artificial Sequence
  Synthetic Polypeptide
QVQLVQSGAEVKKPGASVKVSCKASGYTFTNHIIHWVRQAPGQGLEWMGYINPYDGWGDYNEKFQGRATMTSDTSTSTVYMELSSLRSEDTAVYYCARDGYYRDADVLDYWGQGTLVTVSSGGGGSGGGGSGGGGSDIQMTQSPSSLSASVGDRVTITCQASQDISNYLNWYQQKPGKAPKLLIYYTSRLHTGVPSRFSGSGSGTDFTFTISSLEPEDIATYYCQQGNTLPWTFGQGTKVEIKSGGGGSEVQLVESGGGLVQPGGSLKLSCAASGFTFNKYAMNWVRQAPGKGLEWVARIRSKYNNYATYYADSVKDRFTISRDDSKNTAYLQMNNLKTEDTAVYYCVRHGNFGNSYISYWAYWGQGTLVTVSSGGGGSGGGGSGGGGSQTVVTQEPSLTVSPGGTVTLTCGSSTGAVTSGNYPNWVQQKPGQAPRGLIGGTKFLAPGTPARFSGSLLGGKAALTLSGVQPEDEAEYYCVLWYSNRWVFGGGTKLTVL

SEQ ID NO: 191 - protein, 5 aa, Artificial Sequence
  Synthetic Polypeptide
NHIIH

SEQ ID NO: 192 - protein, 17 aa, Artificial Sequence
  Synthetic Polypeptide
YINPYPGYHAYNQKFQG

SEQ ID NO: 193 - protein, 12 aa, Artificial Sequence
  Synthetic Polypeptide
DGYYRDTDVLDY

SEQ ID NO: 194 - protein, 11 aa, Artificial Sequence
  Synthetic Polypeptide
QASQDISNYLN

SEQ ID NO: 195 - protein, 7 aa, Artificial Sequence
  Synthetic Polypeptide
YTSRLHT

SEQ ID NO: 196 - protein, 9 aa, Artificial Sequence
  Synthetic Polypeptide
QQGNTLPWT

SEQ ID NO: 197 - protein, 121 aa, Artificial Sequence
  Synthetic Polypeptide
QVQLVQSGAKVIKPGASVKVSCKASGYTFTNHIIHWVRQKPGQGLEWMGYINPYPGYHAYNQKFQGRVTMTRDKSTSTVYMELSSLTSEDTAVYYCARDGYYRDTDVLDYWGQGTLVTVSS

SEQ ID NO: 198 - protein, 107 aa, Artificial Sequence
  Synthetic Polypeptide
DIQMTQSPSSLSASVGDRVTITCQASQDISNYLNWYQQKPGRAPKLLIYYTSRLHTGVPSRFSGSGSGTDYSFTISSLQPEDIATYYCQQGNTLPWTFGQGTKVEIK

SEQ ID NO: 199 - protein, 243 aa, Artificial Sequence
  Synthetic Polypeptide
QVQLVQSGAKVIKPGASVKVSCKASGYTFTNHIIHWVRQKPGQGLEWMGYINPYPGYHAYNQKFQGRVTMTRDKSTSTVYMELSSLTSEDTAVYYCARDGYYRDTDVLDYWGQGTLVTVSSGGGGSGGGGSGGGGSDIQMTQSPSSLSASVGDRVTITCQASQDISNYLNWYQQKPGRAPKLLIYYTSRLHTGVPSRFSGSGSGTDYSFTISSLQPEDIATYYCQQGNTLPWTFGQGTKVEIK

SEQ ID NO: 200 - protein, 498 aa, Artificial Sequence
  Synthetic Polypeptide
QVQLVQSGAKVIKPGASVKVSCKASGYTFTNHIIHWVRQKPGQGLEWMGYINPYPGYHAYNQKFQGRVTMTRDKSTSTVYMELSSLTSEDTAVYYCARDGYYRDTDVLDYWGQGTLVTVSSGGGGSGGGGSGGGGSDIQMTQSPSSLSASVGDRVTITCQASQDISNYLNWYQQKPGRAPKLLIYYTSRLHTGVPSRFSGSGSGTDYSFTISSLQPEDIATYYCQQGNTLPWTFGQGTKVEIKSGGGGSEVQLVESGGGLVQPGGSLKLSCAASGFTFNKYAMNWVRQAPGKGLEWVARIRSKYNNYATYYADSVKDRFTISRDDSKNTAYLQMNNLKTEDTAVYYCVRHGNFGNSYISYWAYWGQGTLVTVSSGGGGSGGGGSGGGGSQTVVTQEPSLTVSPGGTVTLTCGSSTGAVTSGNYPNWVQQKPGQAPRGLIGGTKFLAPGTPARFSGSLLGGKAALTLSGVQPEDEAEYYCVLWYSNRWVFGGGTKLTVL

SEQ ID NO: 201 - protein, 5 aa, Artificial Sequence
  Synthetic Polypeptide
NHIIH

SEQ ID NO: 202 - protein, 17 aa, Artificial Sequence
  Synthetic Polypeptide
YINPYDGWGDYNQKFQG

SEQ ID NO: 203 - protein, 12 aa, Artificial Sequence
  Synthetic Polypeptide
DGYYRDADVLDY

SEQ ID NO: 204 - protein, 11 aa, Artificial Sequence
  Synthetic Polypeptide
QASQDISNYLN

SEQ ID NO: 205 - protein, 7 aa, Artificial Sequence
  Synthetic Polypeptide
YTSRLHT

SEQ ID NO: 206 - protein, 9 aa, Artificial Sequence
  Synthetic Polypeptide
QQGNTLPWT

SEQ ID NO: 207 - protein, 121 aa, Artificial Sequence
  Synthetic Polypeptide
QVQLVQSGAKVIKPGASVKVSCKASGYTFTNHIIHWVRQKPGQGLEWMGYINPYDGWGDYNQKFQGRVTMTRDKSTSTVYMELSSLTSEDTAVYYCARDGYYRDADVLDYWGQGTLVTVSS

SEQ ID NO: 208 - protein, 107 aa, Artificial Sequence; identical to SEQ ID NO: 198
  Synthetic Polypeptide

SEQ ID NO: 209 - protein, 243 aa, Artificial Sequence
  Synthetic Polypeptide
QVQLVQSGAKVIKPGASVKVSCKASGYTFTNHIIHWVRQKPGQGLEWMGYINPYDGWGDYNQKFQGRVTMTRDKSTSTVYMELSSLTSEDTAVYYCARDGYYRDADVLDYWGQGTLVTVSSGGGGSGGGGSGGGGSDIQMTQSPSSLSASVGDRVTITCQASQDISNYLNWYQQKPGRAPKLLIYYTSRLHTGVPSRFSGSGSGTDYSFTISSLQPEDIATYYCQQGNTLPWTFGQGTKVEIK

SEQ ID NO: 210 - protein, 498 aa, Artificial Sequence
  Synthetic Polypeptide
QVQLVQSGAKVIKPGASVKVSCKASGYTFTNHIIHWVRQKPGQGLEWMGYINPYDGWGDYNQKFQGRVTMTRDKSTSTVYMELSSLTSEDTAVYYCARDGYYRDADVLDYWGQGTLVTVSSGGGGSGGGGSGGGGSDIQMTQSPSSLSASVGDRVTITCQASQDISNYLNWYQQKPGRAPKLLIYYTSRLHTGVPSRFSGSGSGTDYSFTISSLQPEDIATYYCQQGNTLPWTFGQGTKVEIKSGGGGSEVQLVESGGGLVQPGGSLKLSCAASGFTFNKYAMNWVRQAPGKGLEWVARIRSKYNNYATYYADSVKDRFTISRDDSKNTAYLQMNNLKTEDTAVYYCVRHGNFGNSYISYWAYWGQGTLVTVSSGGGGSGGGGSGGGGSQTVVTQEPSLTVSPGGTVTLTCGSSTGAVTSGNYPNWVQQKPGQAPRGLIGGTKFLAPGTPARFSGSLLGGKAALTLSGVQPEDEAEYYCVLWYSNRWVFGGGTKLTVL

SEQ ID NO: 211 - protein, 5 aa, Artificial Sequence
  Synthetic Polypeptide
NHIIH

SEQ ID NO: 212 - protein, 17 aa, Artificial Sequence
  Synthetic Polypeptide
YINPYPGYHAYNQKFQG

SEQ ID NO: 213 - protein, 12 aa, Artificial Sequence
  Synthetic Polypeptide
DGYYRDTDVLDY

SEQ ID NO: 214 - protein, 11 aa, Artificial Sequence
  Synthetic Polypeptide
QASQDISNYLN

SEQ ID NO: 215 - protein, 7 aa, Artificial Sequence
  Synthetic Polypeptide
YTSRLHT

SEQ ID NO: 216 - protein, 9 aa, Artificial Sequence
  Synthetic Polypeptide
QQGNTLPWT

SEQ ID NO: 217 - protein, 121 aa, Artificial Sequence
  Synthetic Polypeptide
QVQLVQSGAEVIKPGASVKVSCKASGYTFTNHIIHWVRQKPGQGLEWIGYINPYPGYHAYNQKFQGKVTMTRDTSTSTVYMELSSLTSEDTAVYYCARDGYYRDTDVLDYWGQGTLVTVSS

SEQ ID NO: 218 - protein, 107 aa, Artificial Sequence; identical to SEQ ID NO: 158
  Synthetic Polypeptide

SEQ ID NO: 219 - protein, 243 aa, Artificial Sequence
  Synthetic Polypeptide
QVQLVQSGAEVIKPGASVKVSCKASGYTFTNHIIHWVRQKPGQGLEWIGYINPYPGYHAYNQKFQGKVTMTRDTSTSTVYMELSSLTSEDTAVYYCARDGYYRDTDVLDYWGQGTLVTVSSGGGGSGGGGSGGGGSDIQMTQSPSSLSASLGDRVTITCQASQDISNYLNWYQQKPGKAPKLLIYYTSRLHTGVPSRFSGSGSGTDFTFTISSLQQEDIATYYCQQGNTLPWTFGQGTKVEIK

SEQ ID NO: 220 - protein, 498 aa, Artificial Sequence
  Synthetic Polypeptide
QVQLVQSGAEVIKPGASVKVSCKASGYTFTNHIIHWVRQKPGQGLEWIGYINPYPGYHAYNQKFQGKVTMTRDTSTSTVYMELSSLTSEDTAVYYCARDGYYRDTDVLDYWGQGTLVTVSSGGGGSGGGGSGGGGSDIQMTQSPSSLSASLGDRVTITCQASQDISNYLNWYQQKPGKAPKLLIYYTSRLHTGVPSRFSGSGSGTDFTFTISSLQQEDIATYYCQQGNTLPWTFGQGTKVEIKSGGGGSEVQLVESGGGLVQPGGSLKLSCAASGFTFNKYAMNWVRQAPGKGLEWVARIRSKYNNYATYYADSVKDRFTISRDDSKNTAYLQMNNLKTEDTAVYYCVRHGNFGNSYISYWAYWGQGTLVTVSSGGGGSGGGGSGGGGSQTVVTQEPSLTVSPGGTVTLTCGSSTGAVTSGNYPNWVQQKPGQAPRGLIGGTKFLAPGTPARFSGSLLGGKAALTLSGVQPEDEAEYYCVLWYSNRWVFGGGTKLTVL

SEQ ID NO: 221 - protein, 5 aa, Artificial Sequence
  Synthetic Polypeptide
NHIIH

SEQ ID NO: 222 - protein, 17 aa, Artificial Sequence
  Synthetic Polypeptide
YINPYDGWGDYNQKFQG

SEQ ID NO: 223 - protein, 12 aa, Artificial Sequence
  Synthetic Polypeptide
DGYYRDADVLDY

SEQ ID NO: 224 - protein, 11 aa, Artificial Sequence
  Synthetic Polypeptide
QASQDISNYLN

SEQ ID NO: 225 - protein, 7 aa, Artificial Sequence
  Synthetic Polypeptide
YTSRLHT

SEQ ID NO: 226 - protein, 9 aa, Artificial Sequence
  Synthetic Polypeptide
QQGNTLPWT

SEQ ID NO: 227 - protein, 121 aa, Artificial Sequence
  Synthetic Polypeptide
QVQLVQSGAEVIKPGASVKVSCKASGYTFTNHIIHWVRQKPGQGLEWIGYINPYDGWGDYNQKFQGKVTMTRDTSTSTVYMELSSLTSEDTAVYYCARDGYYRDADVLDYWGQGTLVTVSS

SEQ ID NO: 228 - protein, 107 aa, Artificial Sequence; identical to SEQ ID NO: 158
  Synthetic Polypeptide

SEQ ID NO: 229 - protein, 243 aa, Artificial Sequence
  Synthetic Polypeptide
QVQLVQSGAEVIKPGASVKVSCKASGYTFTNHIIHWVRQKPGQGLEWIGYINPYDGWGDYNQKFQGKVTMTRDTSTSTVYMELSSLTSEDTAVYYCARDGYYRDADVLDYWGQGTLVTVSSGGGGSGGGGSGGGGSDIQMTQSPSSLSASLGDRVTITCQASQDISNYLNWYQQKPGKAPKLLIYYTSRLHTGVPSRFSGSGSGTDFTFTISSLQQEDIATYYCQQGNTLPWTFGQGTKVEIK

SEQ ID NO: 230 - protein, 498 aa, Artificial Sequence
  Synthetic Polypeptide
QVQLVQSGAEVIKPGASVKVSCKASGYTFTNHIIHWVRQKPGQGLEWIGYINPYDGWGDYNQKFQGKVTMTRDTSTSTVYMELSSLTSEDTAVYYCARDGYYRDADVLDYWGQGTLVTVSSGGGGSGGGGSGGGGSDIQMTQSPSSLSASLGDRVTITCQASQDISNYLNWYQQKPGKAPKLLIYYTSRLHTGVPSRFSGSGSGTDFTFTISSLQQEDIATYYCQQGNTLPWTFGQGTKVEIKSGGGGSEVQLVESGGGLVQPGGSLKLSCAASGFTFNKYAMNWVRQAPGKGLEWVARIRSKYNNYATYYADSVKDRFTISRDDSKNTAYLQMNNLKTEDTAVYYCVRHGNFGNSYISYWAYWGQGTLVTVSSGGGGSGGGGSGGGGSQTVVTQEPSLTVSPGGTVTLTCGSSTGAVTSGNYPNWVQQKPGQAPRGLIGGTKFLAPGTPARFSGSLLGGKAALTLSGVQPEDEAEYYCVLWYSNRWVFGGGTKLTVL

SEQ ID NO: 231 - protein, 5 aa, Artificial Sequence
  Synthetic Polypeptide
NYDMA

SEQ ID NO: 232 - protein, 17 aa, Artificial Sequence
  Synthetic Polypeptide
SIITSGGDNYYRDSVKG

SEQ ID NO: 233 - protein, 12 aa, Artificial Sequence
  Synthetic Polypeptide
HDYYDGSYGFAY

SEQ ID NO: 234 - protein, 11 aa, Artificial Sequence
  Synthetic Polypeptide
KASQSVGINVD

SEQ ID NO: 235 - protein, 7 aa, Artificial Sequence
  Synthetic Polypeptide
GASNRHT

SEQ ID NO: 236 - protein, 9 aa, Artificial Sequence
  Synthetic Polypeptide
LQYGSIPFT

SEQ ID NO: 237 - protein, 121 aa, Artificial Sequence
  Synthetic Polypeptide
QVQLVESGGGVVQPGRSLRLSCAASGFTFSNYDMAWVRQAPGKGLEWVASIITSGGDNYYRDSVKGRFTISRDNAKNTLYLQMNSLRAEDTAVYYCVRHDYYDGSYGFAYWGQGTLVTVSS

SEQ ID NO: 238 - protein, 107 aa, Artificial Sequence; identical to SEQ ID NO: 48
  Synthetic Polypeptide

SEQ ID NO: 239 - protein, 243 aa, Artificial Sequence
  Synthetic Polypeptide
QVQLVESGGGVVQPGRSLRLSCAASGFTFSNYDMAWVRQAPGKGLEWVASIITSGGDNYYRDSVKGRFTISRDNAKNTLYLQMNSLRAEDTAVYYCVRHDYYDGSYGFAYWGQGTLVTVSSGGGGSGGGGSGGGGSEIVMTQSPASMSVSPGERATLSCKASQSVGINVDWYQQKPGQAPRLLIYGASNRHTGIPARFSGSGSGTEFTLTISSLQSEDFAVYYCLQYGSIPFTFGPGTKVDIK

SEQ ID NO: 240 - protein, 498 aa, Artificial Sequence
  Synthetic Polypeptide
QVQLVESGGGVVQPGRSLRLSCAASGFTFSNYDMAWVRQAPGKGLEWVASIITSGGDNYYRDSVKGRFTISRDNAKNTLYLQMNSLRAEDTAVYYCVRHDYYDGSYGFAYWGQGTLVTVSSGGGGSGGGGSGGGGSEIVMTQSPASMSVSPGERATLSCKASQSVGINVDWYQQKPGQAPRLLIYGASNRHTGIPARFSGSGSGTEFTLTISSLQSEDFAVYYCLQYGSIPFTFGPGTKVDIKSGGGGSEVQLVESGGGLVQPGGSLKLSCAASGFTFNKYAMNWVRQAPGKGLEWVARIRSKYNNYATYYADSVKDRFTISRDDSKNTAYLQMNNLKTEDTAVYYCVRHGNFGNSYISYWAYWGQGTLVTVSSGGGGSGGGGSGGGGSQTVVTQEPSLTVSPGGTVTLTCGSSTGAVTSGNYPNWVQQKPGQAPRGLIGGTKFLAPGTPARFSGSLLGGKAALTLSGVQPEDEAEYYCVLWYSNRWVFGGGTKLTVL

SEQ ID NO: 241 - protein, 5 aa, Artificial Sequence
  Synthetic Polypeptide
NYDMA

SEQ ID NO: 242 - protein, 17 aa, Artificial Sequence
  Synthetic Polypeptide
SIITSGGDNYYRDSVKG

SEQ ID NO: 243 - protein, 12 aa, Artificial Sequence
  Synthetic Polypeptide
HDYYDGSYGFAY

SEQ ID NO: 244 - protein, 11 aa, Artificial Sequence
  Synthetic Polypeptide
KASQSVGINVD

SEQ ID NO: 245 - protein, 7 aa, Artificial Sequence
  Synthetic Polypeptide
GASNRHT

SEQ ID NO: 246 - protein, 9 aa, Artificial Sequence
  Synthetic Polypeptide
LQYGSIPFT

SEQ ID NO: 247 - protein, 121 aa, Artificial Sequence
  Synthetic Polypeptide
QVQLVESGGGVVQPGRSLRLSCAASGFTFSNYDMAWVRQAPGKGLEWVASIITSGGDNYYRDSVKGRFTISRDNSKNTLYLQMNSLRAEDTAVYYCVRHDYYDGSYGFAYWGQGTLVTVSS

SEQ ID NO: 248 - protein, 107 aa, Artificial Sequence; identical to SEQ ID NO: 8
  Synthetic Polypeptide

SEQ ID NO: 249 - protein, 243 aa, Artificial Sequence
  Synthetic Polypeptide
QVQLVESGGGVVQPGRSLRLSCAASGFTFSNYDMAWVRQAPGKGLEWVASIITSGGDNYYRDSVKGRFTISRDNSKNTLYLQMNSLRAEDTAVYYCVRHDYYDGSYGFAYWGQGTLVTVSSGGGGSGGGGSGGGGSEIVMTQSPATLSVSPGERVTLSCKASQSVGINVDWYQQKPGQAPRLLIYGASNRHTGIPARFSGSGSGREFTLTISSLQSEDFAVYYCLQYGSIPFTFGPGTKVDIK

SEQ ID NO: 250 - protein, 498 aa, Artificial Sequence
  Synthetic Polypeptide
QVQLVESGGGVVQPGRSLRLSCAASGFTFSNYDMAWVRQAPGKGLEWVASIITSGGDNYYRDSVKGRFTISRDNSKNTLYLQMNSLRAEDTAVYYCVRHDYYDGSYGFAYWGQGTLVTVSSGGGGSGGGGSGGGGSEIVMTQSPATLSVSPGERVTLSCKASQSVGINVDWYQQKPGQAPRLLIYGASNRHTGIPARFSGSGSGREFTLTISSLQSEDFAVYYCLQYGSIPFTFGPGTKVDIKSGGGGSEVQLVESGGGLVQPGGSLKLSCAASGFTFNKYAMNWVRQAPGKGLEWVARIRSKYNNYATYYADSVKDRFTISRDDSKNTAYLQMNNLKTEDTAVYYCVRHGNFGNSYISYWAYWGQGTLVTVSSGGGGSGGGGSGGGGSQTVVTQEPSLTVSPGGTVTLTCGSSTGAVTSGNYPNWVQQKPGQAPRGLIGGTKFLAPGTPARFSGSLLGGKAALTLSGVQPEDEAEYYCVLWYSNRWVFGGGTKLTVL

SEQ ID NO: 251 - protein, 5 aa, Artificial Sequence
  Synthetic Polypeptide
NYDMA

SEQ ID NO: 252 - protein, 17 aa, Artificial Sequence
  Synthetic Polypeptide
SIITSGGDNYYRDSVKG

SEQ ID NO: 253 - protein, 12 aa, Artificial Sequence
  Synthetic Polypeptide
HDYYDGSYGFAY

SEQ ID NO: 254 - protein, 11 aa, Artificial Sequence
  Synthetic Polypeptide
KASQSVGINVD

SEQ ID NO: 255 - protein, 7 aa, Artificial Sequence
  Synthetic Polypeptide
GASNRHT

SEQ ID NO: 256 - protein, 9 aa, Artificial Sequence
  Synthetic Polypeptide
LQYGSIPFT

SEQ ID NO: 257 - protein, 121 aa, Artificial Sequence
  Synthetic Polypeptide
QVQLVESGGGVVQPGRSLRLSCAASGFTFSNYDMAWVRQAPGKGLEWVASIITSGGDNYYRDSVKGRFTISRDNSKNTLYLQMNSLRSEDTAVYYCVRHDYYDGSYGFAYWGQGTLVTVSS

SEQ ID NO: 258 - protein, 107 aa, Artificial Sequence; identical to SEQ ID NO: 28
  Synthetic Polypeptide

SEQ ID NO: 259 - protein, 243 aa, Artificial Sequence
  Synthetic Polypeptide
QVQLVESGGGVVQPGRSLRLSCAASGFTFSNYDMAWVRQAPGKGLEWVASIITSGGDNYYRDSVKGRFTISRDNSKNTLYLQMNSLRSEDTAVYYCVRHDYYDGSYGFAYWGQGTLVTVSSGGGGSGGGGSGGGGSEIVMTQSPATLSVSPGERVTLSCKASQSVGINVDWYQQKPGQAPRLLIYGASNRHTGIPARFSGSGSGTEFTLTISSLQSEDFAVYYCLQYGSIPFTFGPGTKVDIK

SEQ ID NO: 260 - protein, 498 aa, Artificial Sequence
  Synthetic Polypeptide
QVQLVESGGGVVQPGRSLRLSCAASGFTFSNYDMAWVRQAPGKGLEWVASIITSGGDNYYRDSVKGRFTISRDNSKNTLYLQMNSLRSEDTAVYYCVRHDYYDGSYGFAYWGQGTLVTVSSGGGGSGGGGSGGGGSEIVMTQSPATLSVSPGERVTLSCKASQSVGINVDWYQQKPGQAPRLLIYGASNRHTGIPARFSGSGSGTEFTLTISSLQSEDFAVYYCLQYGSIPFTFGPGTKVDIKSGGGGSEVQLVESGGGLVQPGGSLKLSCAASGFTFNKYAMNWVRQAPGKGLEWVARIRSKYNNYATYYADSVKDRFTISRDDSKNTAYLQMNNLKTEDTAVYYCVRHGNFGNSYISYWAYWGQGTLVTVSSGGGGSGGGGSGGGGSQTVVTQEPSLTVSPGGTVTLTCGSSTGAVTSGNYPNWVQQKPGQAPRGLIGGTKFLAPGTPARFSGSLLGGKAALTLSGVQPEDEAEYYCVLWYSNRWVFGGGTKLTVL

SEQ ID NO: 261 - protein, 5 aa, Artificial Sequence
  Synthetic Polypeptide
NYDMA

SEQ ID NO: 262 - protein, 17 aa, Artificial Sequence
  Synthetic Polypeptide
SIITSGGDNYYRDSVKG

SEQ ID NO: 263 - protein, 12 aa, Artificial Sequence
  Synthetic Polypeptide
HDYYDGSYGFAY

SEQ ID NO: 264 - protein, 11 aa, Artificial Sequence
  Synthetic Polypeptide
KASQSVGINVD

SEQ ID NO: 265 - protein, 7 aa, Artificial Sequence
  Synthetic Polypeptide
GASNRHT

SEQ ID NO: 266 - protein, 9 aa, Artificial Sequence
  Synthetic Polypeptide
LQYGSIPFT

SEQ ID NO: 267 - protein, 121 aa, Artificial Sequence
  Synthetic Polypeptide
QVQLVESGGGVVQPGRSLRLSCAASGFTFSNYDMAWVRQAPGKGLEWVASIITSGGDNYYRDSVKGRFTVSRDNSKNTLYLQMNSLRAEDTAVYYCVRHDYYDGSYGFAYWGQGTLVTVSS

SEQ ID NO: 268 - protein, 107 aa, Artificial Sequence; identical to SEQ ID NO: 68
  Synthetic Polypeptide

SEQ ID NO: 269 - protein, 243 aa, Artificial Sequence
  Synthetic Polypeptide
QVQLVESGGGVVQPGRSLRLSCAASGFTFSNYDMAWVRQAPGKGLEWVASIITSGGDNYYRDSVKGRFTVSRDNSKNTLYLQMNSLRAEDTAVYYCVRHDYYDGSYGFAYWGQGTLVTVSSGGGGSGGGGSGGGGSEIVMTQSPATLSVSPGERATLSCKASQSVGINVDWYQQKPGQAPRLLIYGASNRHTGIPARFSGSGSGTEFTLTISSLQAEDFAVYYCLQYGSIPFTFGPGTKVDIK

SEQ ID NO: 270 - protein, 498 aa, Artificial Sequence
  Synthetic Polypeptide
QVQLVESGGGVVQPGRSLRLSCAASGFTFSNYDMAWVRQAPGKGLEWVASIITSGGDNYYRDSVKGRFTVSRDNSKNTLYLQMNSLRAEDTAVYYCVRHDYYDGSYGFAYWGQGTLVTVSSGGGGSGGGGSGGGGSEIVMTQSPATLSVSPGERATLSCKASQSVGINVDWYQQKPGQAPRLLIYGASNRHTGIPARFSGSGSGTEFTLTISSLQAEDFAVYYCLQYGSIPFTFGPGTKVDIKSGGGGSEVQLVESGGGLVQPGGSLKLSCAASGFTFNKYAMNWVRQAPGKGLEWVARIRSKYNNYATYYADSVKDRFTISRDDSKNTAYLQMNNLKTEDTAVYYCVRHGNFGNSYISYWAYWGQGTLVTVSSGGGGSGGGGSGGGGSQTVVTQEPSLTVSPGGTVTLTCGSSTGAVTSGNYPNWVQQKPGQAPRGLIGGTKFLAPGTPARFSGSLLGGKAALTLSGVQPEDEAEYYCVLWYSNRWVFGGGTKLTVL

SEQ ID NO: 271 - protein, 5 aa, Artificial Sequence
  Synthetic Polypeptide
NYDMA

SEQ ID NO: 272 - protein, 17 aa, Artificial Sequence
  Synthetic Polypeptide
SISTRGDITSYRDSVKG

SEQ ID NO: 273 - protein, 12 aa, Artificial Sequence
  Synthetic Polypeptide
QDYYTDYMGFAY

SEQ ID NO: 274 - protein, 11 aa, Artificial Sequence
  Synthetic Polypeptide
RASEDIYNGLA

SEQ ID NO: 275 - protein, 7 aa, Artificial Sequence
  Synthetic Polypeptide
GASSLQD

SEQ ID NO: 276 - protein, 9 aa, Artificial Sequence
  Synthetic Polypeptide
QQSYKYPLT

SEQ ID NO: 277 - protein, 121 aa, Artificial Sequence
  Synthetic Polypeptide
EVQLLESGGGLVQPGGSLRLSCAASGFTFSNYDMAWVRQAPGKGLEWVSSISTRGDITSYRDSVKGRFTISRDNAKNTLYLQMNSLRAEDTAVYYCARQDYYTDYMGFAYWGQGTLVTVSS

SEQ ID NO: 278 - protein, 107 aa, Artificial Sequence
  Synthetic Polypeptide
AIQMTQSPSSLSASVGDTVTITCRASEDIYNGLAWYQQKPGKAPKLLIYGASSLQDGVPSRFSGSGSGTDYTLTISSLQPEDEATYYCQQSYKYPLTFGGGTKVEIK

SEQ ID NO: 279 - protein, 243 aa, Artificial Sequence
  Synthetic Polypeptide
EVQLLESGGGLVQPGGSLRLSCAASGFTFSNYDMAWVRQAPGKGLEWVSSISTRGDITSYRDSVKGRFTISRDNAKNTLYLQMNSLRAEDTAVYYCARQDYYTDYMGFAYWGQGTLVTVSSGGGGSGGGGSGGGGSAIQMTQSPSSLSASVGDTVTITCRASEDIYNGLAWYQQKPGKAPKLLIYGASSLQDGVPSRFSGSGSGTDYTLTISSLQPEDEATYYCQQSYKYPLTFGGGTKVEIK

SEQ ID NO: 280 - protein, 498 aa, Artificial Sequence
  Synthetic Polypeptide
EVQLLESGGGLVQPGGSLRLSCAASGFTFSNYDMAWVRQAPGKGLEWVSSISTRGDITSYRDSVKGRFTISRDNAKNTLYLQMNSLRAEDTAVYYCARQDYYTDYMGFAYWGQGTLVTVSSGGGGSGGGGSGGGGSAIQMTQSPSSLSASVGDTVTITCRASEDIYNGLAWYQQKPGKAPKLLIYGASSLQDGVPSRFSGSGSGTDYTLTISSLQPEDEATYYCQQSYKYPLTFGGGTKVEIKSGGGGSEVQLVESGGGLVQPGGSLKLSCAASGFTFNKYAMNWVRQAPGKGLEWVARIRSKYNNYATYYADSVKDRFTISRDDSKNTAYLQMNNLKTEDTAVYYCVRHGNFGNSYISYWAYWGQGTLVTVSSGGGGSGGGGSGGGGSQTVVTQEPSLTVSPGGTVTLTCGSSTGAVTSGNYPNWVQQKPGQAPRGLIGGTKFLAPGTPARFSGSLLGGKAALTLSGVQPEDEAEYYCVLWYSNRWVFGGGTKLTVL

SEQ ID NO: 281 - protein, 5 aa, Artificial Sequence
  Synthetic Polypeptide
NYDMA

SEQ ID NO: 282 - protein, 17 aa, Artificial Sequence
  Synthetic Polypeptide
SISTRGDITSYRDSVKG

SEQ ID NO: 283 - protein, 12 aa, Artificial Sequence
  Synthetic Polypeptide
QDYYTDYMGFAY

SEQ ID NO: 284 - protein, 11 aa, Artificial Sequence
  Synthetic Polypeptide
RASEDIYNGLA

SEQ ID NO: 285 - protein, 7 aa, Artificial Sequence
  Synthetic Polypeptide
GASSLQD

SEQ ID NO: 286 - protein, 9 aa, Artificial Sequence
  Synthetic Polypeptide
QQSYKYPLT

SEQ ID NO: 287 - protein, 121 aa, Artificial Sequence
  Synthetic Polypeptide
EVQLLESGGGLVQPGRSLRLSCAASGFTFSNYDMAWVRQAPGKGLEWVSSISTRGDITSYRDSVKGRFTISRDNSKNTLYLQMNSLRAEDTAVYYCARQDYYTDYMGFAYWGQGTLVTVSS

SEQ ID NO: 288 - protein, 107 aa, Artificial Sequence
  Synthetic Polypeptide
AIQMTQSPSSLSASVGDRVTITCRASEDIYNGLAWYQQKPGKAPKLLIYGASSLQDGVPSRFSGSGSGTDFTLTISSMQPEDEATYYCQQSYKYPLTFGGGTKVEIK

SEQ ID NO: 289 - protein, 243 aa, Artificial Sequence
  Synthetic Polypeptide
EVQLLESGGGLVQPGRSLRLSCAASGFTFSNYDMAWVRQAPGKGLEWVSSISTRGDITSYRDSVKGRFTISRDNSKNTLYLQMNSLRAEDTAVYYCARQDYYTDYMGFAYWGQGTLVTVSSGGGGSGGGGSGGGGSAIQMTQSPSSLSASVGDRVTITCRASEDIYNGLAWYQQKPGKAPKLLIYGASSLQDGVPSRFSGSGSGTDFTLTISSMQPEDEATYYCQQSYKYPLTFGGGTKVEIK

SEQ ID NO: 290 - protein, 498 aa, Artificial Sequence
  Synthetic Polypeptide
EVQLLESGGGLVQPGRSLRLSCAASGFTFSNYDMAWVRQAPGKGLEWVSSISTRGDITSYRDSVKGRFTISRDNSKNTLYLQMNSLRAEDTAVYYCARQDYYTDYMGFAYWGQGTLVTVSSGGGGSGGGGSGGGGSAIQMTQSPSSLSASVGDRVTITCRASEDIYNGLAWYQQKPGKAPKLLIYGASSLQDGVPSRFSGSGSGTDFTLTISSMQPEDEATYYCQQSYKYPLTFGGGTKVEIKSGGGGSEVQLVESGGGLVQPGGSLKLSCAASGFTFNKYAMNWVRQAPGKGLEWVARIRSKYNNYATYYADSVKDRFTISRDDSKNTAYLQMNNLKTEDTAVYYCVRHGNFGNSYISYWAYWGQGTLVTVSSGGGGSGGGGSGGGGSQTVVTQEPSLTVSPGGTVTLTCGSSTGAVTSGNYPNWVQQKPGQAPRGLIGGTKFLAPGTPARFSGSLLGGKAALTLSGVQPEDEAEYYCVLWYSNRWVFGGGTKLTVL

SEQ ID NO: 291 - protein, 5 aa, Artificial Sequence
  Synthetic Polypeptide
NYDMA

SEQ ID NO: 292 - protein, 17 aa, Artificial Sequence
  Synthetic Polypeptide
SISTRGDITSYRDSVKG

SEQ ID NO: 293 - protein, 12 aa, Artificial Sequence
  Synthetic Polypeptide
QDYYTDYMGFAY

SEQ ID NO: 294 - protein, 11 aa, Artificial Sequence
  Synthetic Polypeptide
RASEDIYNGLA

SEQ ID NO: 295 - protein, 7 aa, Artificial Sequence
  Synthetic Polypeptide
GASSLQD

SEQ ID NO: 296 - protein, 9 aa, Artificial Sequence
  Synthetic Polypeptide
QQSYKYPLT

SEQ ID NO: 297 - protein, 121 aa, Artificial Sequence
  Synthetic Polypeptide
EVQLLESGGGLVQPGGSLRLSCAASGFTFSNYDMAWVRQAPGKGLEWVSSISTRGDITSYRDSVKGRFTISRDNSKNTLYLQMNSLRAEDTAVYYCARQDYYTDYMGFAYWGQGTLVTVSS

SEQ ID NO: 298 - protein, 107 aa, Artificial Sequence
  Synthetic Polypeptide
AIQMTQSPSSLSASVGDRVTITCRASEDIYNGLAWYQQKPGKAPKLLIYGASSLQDGVPSRFSGSGSGTHYTLTISSLQPEDEATYYCQQSYKYPLTFGGGTKVEIK

SEQ ID NO: 299 - protein, 243 aa, Artificial Sequence
  Synthetic Polypeptide
EVQLLESGGGLVQPGGSLRLSCAASGFTFSNYDMAWVRQAPGKGLEWVSSISTRGDITSYRDSVKGRFTISRDNSKNTLYLQMNSLRAEDTAVYYCARQDYYTDYMGFAYWGQGTLVTVSSGGGGSGGGGSGGGGSAIQMTQSPSSLSASVGDRVTITCRASEDIYNGLAWYQQKPGKAPKLLIYGASSLQDGVPSRFSGSGSGTHYTLTISSLQPEDEATYYCQQSYKYPLTFGGGTKVEIK

SEQ ID NO: 300 - protein, 498 aa, Artificial Sequence
  Synthetic Polypeptide
EVQLLESGGGLVQPGGSLRLSCAASGFTFSNYDMAWVRQAPGKGLEWVSSISTRGDITSYRDSVKGRFTISRDNSKNTLYLQMNSLRAEDTAVYYCARQDYYTDYMGFAYWGQGTLVTVSSGGGGSGGGGSGGGGSAIQMTQSPSSLSASVGDRVTITCRASEDIYNGLAWYQQKPGKAPKLLIYGASSLQDGVPSRFSGSGSGTHYTLTISSLQPEDEATYYCQQSYKYPLTFGGGTKVEIKSGGGGSEVQLVESGGGLVQPGGSLKLSCAASGFTFNKYAMNWVRQAPGKGLEWVARIRSKYNNYATYYADSVKDRFTISRDDSKNTAYLQMNNLKTEDTAVYYCVRHGNFGNSYISYWAYWGQGTLVTVSSGGGGSGGGGSGGGGSQTVVTQEPSLTVSPGGTVTLTCGSSTGAVTSGNYPNWVQQKPGQAPRGLIGGTKFLAPGTPARFSGSLLGGKAALTLSGVQPEDEAEYYCVLWYSNRWVFGGGTKLTVL

SEQ ID NO: 301 - protein, 5 aa, Artificial Sequence
  Synthetic Polypeptide
NYDMA

SEQ ID NO: 302 - protein, 17 aa, Artificial Sequence
  Synthetic Polypeptide
SISTRGDITSYRDSVKG

SEQ ID NO: 303 - protein, 12 aa, Artificial Sequence
  Synthetic Polypeptide
QDYYTDYMGFAY

SEQ ID NO: 304 - protein, 11 aa, Artificial Sequence
  Synthetic Polypeptide
RASEDIYNGLA

SEQ ID NO: 305 - protein, 7 aa, Artificial Sequence
  Synthetic Polypeptide
GASSLQD

SEQ ID NO: 306 - protein, 9 aa, Artificial Sequence
  Synthetic Polypeptide
AGPHKYPLT

SEQ ID NO: 307 - protein, 121 aa, Artificial Sequence; identical to SEQ ID NO: 277
  Synthetic Polypeptide

SEQ ID NO: 308 - protein, 107 aa, Artificial Sequence
  Synthetic Polypeptide
AIQMTQSPSSLSASVGDTVTITCRASEDIYNGLAWYQQKPGKAPKLLIYGASSLQDGVPSRFSGSGSGTDYTLTISSLQPEDEATYYCAGPHKYPLTFGGGTKVEIK

SEQ ID NO: 309 - protein, 243 aa, Artificial Sequence
  Synthetic Polypeptide
EVQLLESGGGLVQPGGSLRLSCAASGFTFSNYDMAWVRQAPGKGLEWVSSISTRGDITSYRDSVKGRFTISRDNAKNTLYLQMNSLRAEDTAVYYCARQDYYTDYMGFAYWGQGTLVTVSSGGGGSGGGGSGGGGSAIQMTQSPSSLSASVGDTVTITCRASEDIYNGLAWYQQKPGKAPKLLIYGASSLQDGVPSRFSGSGSGTDYTLTISSLQPEDEATYYCAGPHKYPLTFGGGTKVEIK

SEQ ID NO: 310 - protein, 498 aa, Artificial Sequence
  Synthetic Polypeptide
EVQLLESGGGLVQPGGSLRLSCAASGFTFSNYDMAWVRQAPGKGLEWVSSISTRGDITSYRDSVKGRFTISRDNAKNTLYLQMNSLRAEDTAVYYCARQDYYTDYMGFAYWGQGTLVTVSSGGGGSGGGGSGGGGSAIQMTQSPSSLSASVGDTVTITCRASEDIYNGLAWYQQKPGKAPKLLIYGASSLQDGVPSRFSGSGSGTDYTLTISSLQPEDEATYYCAGPHKYPLTFGGGTKVEIKSGGGGSEVQLVESGGGLVQPGGSLKLSCAASGFTFNKYAMNWVRQAPGKGLEWVARIRSKYNNYATYYADSVKDRFTISRDDSKNTAYLQMNNLKTEDTAVYYCVRHGNFGNSYISYWAYWGQGTLVTVSSGGGGSGGGGSGGGGSQTVVTQEPSLTVSPGGTVTLTCGSSTGAVTSGNYPNWVQQKPGQAPRGLIGGTKFLAPGTPARFSGSLLGGKAALTLSGVQPEDEAEYYCVLWYSNRWVFGGGTKLTVL

SEQ ID NO: 311 - protein, 5 aa, Artificial Sequence
  Synthetic Polypeptide
NYDMA

SEQ ID NO: 312 - protein, 17 aa, Artificial Sequence
  Synthetic Polypeptide
SISTRGDITSYRDSVKG

SEQ ID NO: 313 - protein, 12 aa, Artificial Sequence
  Synthetic Polypeptide
QDYYTDYMGFAY

SEQ ID NO: 314 - protein, 11 aa, Artificial Sequence
  Synthetic Polypeptide
RASEDIYNGLA

SEQ ID NO: 315 - protein, 7 aa, Artificial Sequence
  Synthetic Polypeptide
GASSLQD

SEQ ID NO: 316 - protein, 9 aa, Artificial Sequence
  Synthetic Polypeptide
AGPHKYPLT

SEQ ID NO: 317 - protein, 121 aa, Artificial Sequence; identical to SEQ ID NO: 297
  Synthetic Polypeptide

SEQ ID NO: 318 - protein, 107 aa, Artificial Sequence
  Synthetic Polypeptide
AIQMTQSPSSLSASVGDRVTITCRASEDIYNGLAWYQQKPGKAPKLLIYGASSLQDGVPSRFSGSGSGTHYTLTISSLQPEDEATYYCAGPHKYPLTFGGGTKVEIK

SEQ ID NO: 319 - protein, 243 aa, Artificial Sequence
  Synthetic Polypeptide
EVQLLESGGGLVQPGGSLRLSCAASGFTFSNYDMAWVRQAPGKGLEWVSSISTRGDITSYRDSVKGRFTISRDNSKNTLYLQMNSLRAEDTAVYYCARQDYYTDYMGFAYWGQGTLVTVSSGGGGSGGGGSGGGGSAIQMTQSPSSLSASVGDRVTITCRASEDIYNGLAWYQQKPGKAPKLLIYGASSLQDGVPSRFSGSGSGTHYTLTISSLQPEDEATYYCAGPHKYPLTFGGGTKVEIK

SEQ ID NO: 320 - protein, 498 aa, Artificial Sequence
  Synthetic Polypeptide
EVQLLESGGGLVQPGGSLRLSCAASGFTFSNYDMAWVRQAPGKGLEWVSSISTRGDITSYRDSVKGRFTISRDNSKNTLYLQMNSLRAEDTAVYYCARQDYYTDYMGFAYWGQGTLVTVSSGGGGSGGGGSGGGGSAIQMTQSPSSLSASVGDRVTITCRASEDIYNGLAWYQQKPGKAPKLLIYGASSLQDGVPSRFSGSGSGTHYTLTISSLQPEDEATYYCAGPHKYPLTFGGGTKVEIKSGGGGSEVQLVESGGGLVQPGGSLKLSCAASGFTFNKYAMNWVRQAPGKGLEWVARIRSKYNNYATYYADSVKDRFTISRDDSKNTAYLQMNNLKTEDTAVYYCVRHGNFGNSYISYWAYWGQGTLVTVSSGGGGSGGGGSGGGGSQTVVTQEPSLTVSPGGTVTLTCGSSTGAVTSGNYPNWVQQKPGQAPRGLIGGTKFLAPGTPARFSGSLLGGKAALTLSGVQPEDEAEYYCVLWYSNRWVFGGGTKLTVL

SEQ ID NO: 321 - protein, 5 aa, Artificial Sequence
  Synthetic Polypeptide
NYDMA

SEQ ID NO: 322 - protein, 17 aa, Artificial Sequence
  Synthetic Polypeptide
SISTRGDITSYRDSVKG

SEQ ID NO: 323 - protein, 12 aa, Artificial Sequence
  Synthetic Polypeptide
QDYYTDYMGFAY

SEQ ID NO: 324 - protein, 11 aa, Artificial Sequence
  Synthetic Polypeptide
RASEDIYNGLA

SEQ ID NO: 325 - protein, 7 aa, Artificial Sequence
  Synthetic Polypeptide
GASSLQD

SEQ ID NO: 326 - protein, 9 aa, Artificial Sequence
  Synthetic Polypeptide
QQSRNYQQT

SEQ ID NO: 327 - protein, 121 aa, Artificial Sequence; identical to SEQ ID NO: 277
  Synthetic Polypeptide

SEQ ID NO: 328 - protein, 107 aa, Artificial Sequence
  Synthetic Polypeptide
AIQMTQSPSSLSASVGDTVTITCRASEDIYNGLAWYQQKPGKAPKLLIYGASSLQDGVPSRFSGSGSGTDYTLTISSLQPEDEATYYCQQSRNYQQTFGGGTKVEIK

SEQ ID NO: 329 - protein, 243 aa, Artificial Sequence
  Synthetic Polypeptide
EVQLLESGGGLVQPGGSLRLSCAASGFTFSNYDMAWVRQAPGKGLEWVSSISTRGDITSYRDSVKGRFTISRDNAKNTLYLQMNSLRAEDTAVYYCARQDYYTDYMGFAYWGQGTLVTVSSGGGGSGGGGSGGGGSAIQMTQSPSSLSASVGDTVTITCRASEDIYNGLAWYQQKPGKAPKLLIYGASSLQDGVPSRFSGSGSGTDYTLTISSLQPEDEATYYCQQSRNYQQTFGGGTKVEIK

SEQ ID NO: 330 - protein, 498 aa, Artificial Sequence
  Synthetic Polypeptide
EVQLLESGGGLVQPGGSLRLSCAASGFTFSNYDMAWVRQAPGKGLEWVSSISTRGDITSYRDSVKGRFTISRDNAKNTLYLQMNSLRAEDTAVYYCARQDYYTDYMGFAYWGQGTLVTVSSGGGGSGGGGSGGGGSAIQMTQSPSSLSASVGDTVTITCRASEDIYNGLAWYQQKPGKAPKLLIYGASSLQDGVPSRFSGSGSGTDYTLTISSLQPEDEATYYCQQSRNYQQTFGGGTKVEIKSGGGGSEVQLVESGGGLVQPGGSLKLSCAASGFTFNKYAMNWVRQAPGKGLEWVARIRSKYNNYATYYADSVKDRFTISRDDSKNTAYLQMNNLKTEDTAVYYCVRHGNFGNSYISYWAYWGQGTLVTVSSGGGGSGGGGSGGGGSQTVVTQEPSLTVSPGGTVTLTCGSSTGAVTSGNYPNWVQQKPGQAPRGLIGGTKFLAPGTPARFSGSLLGGKAALTLSGVQPEDEAEYYCVLWYSNRWVFGGGTKLTVL

SEQ ID NO: 331 - protein, 5 aa, Artificial Sequence
  Synthetic Polypeptide
NYDMA

SEQ ID NO: 332 - protein, 17 aa, Artificial Sequence
  Synthetic Polypeptide
SISTRGDITSYRDSVKG

SEQ ID NO: 333 - protein, 12 aa, Artificial Sequence
  Synthetic Polypeptide
QDYYTDYMGFAY

SEQ ID NO: 334 - protein, 11 aa, Artificial Sequence
  Synthetic Polypeptide
RASEDIYNGLA

SEQ ID NO: 335 - protein, 7 aa, Artificial Sequence
  Synthetic Polypeptide
GASSLQD

SEQ ID NO: 336 - protein, 9 aa, Artificial Sequence
  Synthetic Polypeptide
QQSRNYQQT

SEQ ID NO: 337 - protein, 121 aa, Artificial Sequence; identical to SEQ ID NO: 297
  Synthetic Polypeptide

SEQ ID NO: 338 - protein, 107 aa, Artificial Sequence
  Synthetic Polypeptide
AIQMTQSPSSLSASVGDRVTITCRASEDIYNGLAWYQQKPGKAPKLLIYGASSLQDGVPSRFSGSGSGTHYTLTISSLQPEDEATYYCQQSRNYQQTFGGGTKVEIK

SEQ ID NO: 339 - protein, 243 aa, Artificial Sequence
  Synthetic Polypeptide
EVQLLESGGGLVQPGGSLRLSCAASGFTFSNYDMAWVRQAPGKGLEWVSSISTRGDITSYRDSVKGRFTISRDNSKNTLYLQMNSLRAEDTAVYYCARQDYYTDYMGFAYWGQGTLVTVSSGGGGSGGGGSGGGGSAIQMTQSPSSLSASVGDRVTITCRASEDIYNGLAWYQQKPGKAPKLLIYGASSLQDGVPSRFSGSGSGTHYTLTISSLQPEDEATYYCQQSRNYQQTFGGGTKVEIK

SEQ ID NO: 340 - protein, 498 aa, Artificial Sequence
  Synthetic Polypeptide
EVQLLESGGGLVQPGGSLRLSCAASGFTFSNYDMAWVRQAPGKGLEWVSSISTRGDITSYRDSVKGRFTISRDNSKNTLYLQMNSLRAEDTAVYYCARQDYYTDYMGFAYWGQGTLVTVSSGGGGSGGGGSGGGGSAIQMTQSPSSLSASVGDRVTITCRASEDIYNGLAWYQQKPGKAPKLLIYGASSLQDGVPSRFSGSGSGTHYTLTISSLQPEDEATYYCQQSRNYQQTFGGGTKVEIKSGGGGSEVQLVESGGGLVQPGGSLKLSCAASGFTFNKYAMNWVRQAPGKGLEWVARIRSKYNNYATYYADSVKDRFTISRDDSKNTAYLQMNNLKTEDTAVYYCVRHGNFGNSYISYWAYWGQGTLVTVSSGGGGSGGGGSGGGGSQTVVTQEPSLTVSPGGTVTLTCGSSTGAVTSGNYPNWVQQKPGQAPRGLIGGTKFLAPGTPARFSGSLLGGKAALTLSGVQPEDEAEYYCVLWYSNRWVFGGGTKLTVL

SEQ ID NO: 341 - protein, 5 aa, Artificial Sequence
  Synthetic Polypeptide
NYDMA

SEQ ID NO: 342 - protein, 17 aa, Artificial Sequence
  Synthetic Polypeptide
SISTRGDITSYRDSVKG

SEQ ID NO: 343 - protein, 12 aa, Artificial Sequence
  Synthetic Polypeptide
QDYYTDYMGFAY

SEQ ID NO: 344 - protein, 11 aa, Artificial Sequence
  Synthetic Polypeptide
RASEDIYNGLA

SEQ ID NO: 345 - protein, 7 aa, Artificial Sequence
  Synthetic Polypeptide
GASSLQD

SEQ ID NO: 346 - protein, 9 aa, Artificial Sequence
  Synthetic Polypeptide
QQSRNYQQT

SEQ ID NO: 347 - protein, 121 aa, Artificial Sequence; identical to SEQ ID NO: 297
  Synthetic Polypeptide

SEQ ID NO: 348 - protein, 107 aa, Artificial Sequence
  Synthetic Polypeptide
AIQMTQSPSSLSASVGDRVTITCRASEDIYNGLAWYQQKPGKAPKLLIYGASSLQDGVPSRFSGSGSGTEFTLTISSLQPEDEATYYCQQSRNYQQTFGGGTKVEIK

SEQ ID NO: 349 - protein, 243 aa, Artificial Sequence
  Synthetic Polypeptide
EVQLLESGGGLVQPGGSLRLSCAASGFTFSNYDMAWVRQAPGKGLEWVSSISTRGDITSYRDSVKGRFTISRDNSKNTLYLQMNSLRAEDTAVYYCARQDYYTDYMGFAYWGQGTLVTVSSGGGGSGGGGSGGGGSAIQMTQSPSSLSASVGDRVTITCRASEDIYNGLAWYQQKPGKAPKLLIYGASSLQDGVPSRFSGSGSGTEFTLTISSLQPEDEATYYCQQSRNYQQTFGGGTKVEIK

SEQ ID NO: 350 - protein, 498 aa, Artificial Sequence
  Synthetic Polypeptide
EVQLLESGGGLVQPGGSLRLSCAASGFTFSNYDMAWVRQAPGKGLEWVSSISTRGDITSYRDSVKGRFTISRDNSKNTLYLQMNSLRAEDTAVYYCARQDYYTDYMGFAYWGQGTLVTVSSGGGGSGGGGSGGGGSAIQMTQSPSSLSASVGDRVTITCRASEDIYNGLAWYQQKPGKAPKLLIYGASSLQDGVPSRFSGSGSGTEFTLTISSLQPEDEATYYCQQSRNYQQTFGGGTKVEIKSGGGGSEVQLVESGGGLVQPGGSLKLSCAASGFTFNKYAMNWVRQAPGKGLEWVARIRSKYNNYATYYADSVKDRFTISRDDSKNTAYLQMNNLKTEDTAVYYCVRHGNFGNSYISYWAYWGQGTLVTVSSGGGGSGGGGSGGGGSQTVVTQEPSLTVSPGGTVTLTCGSSTGAVTSGNYPNWVQQKPGQAPRGLIGGTKFLAPGTPARFSGSLLGGKAALTLSGVQPEDEAEYYCVLWYSNRWVFGGGTKLTVL

SEQ ID NO: 351 - protein, 5 aa, Artificial Sequence
  Synthetic Polypeptide
NYDMA

SEQ ID NO: 352 - protein, 17 aa, Artificial Sequence
  Synthetic Polypeptide
SISTRGDITSYRDSVKG

SEQ ID NO: 353 - protein, 12 aa, Artificial Sequence
  Synthetic Polypeptide
QDYYTDYMGFAY

SEQ ID NO: 354 - protein, 11 aa, Artificial Sequence
  Synthetic Polypeptide
RASEDIYNGLA

SEQ ID NO: 355 - protein, 7 aa, Artificial Sequence
  Synthetic Polypeptide
GASSLQD

SEQ ID NO: 356 - protein, 9 aa, Artificial Sequence
  Synthetic Polypeptide
AGPHKYPLT

SEQ ID NO: 357 - protein, 121 aa, Artificial Sequence; identical to SEQ ID NO: 297
  Synthetic Polypeptide

SEQ ID NO: 358 - protein, 107 aa, Artificial Sequence
  Synthetic Polypeptide
AIQMTQSPSSLSASVGDRVTITCRASEDIYNGLAWYQQKPGKAPKLLIYGASSLQDGVPSRFSGSGSGTEFTLTISSLQPEDEATYYCAGPHKYPLTFGGGTKVEIK

SEQ ID NO: 359 - protein, 243 aa, Artificial Sequence
  Synthetic Polypeptide
EVQLLESGGGLVQPGGSLRLSCAASGFTFSNYDMAWVRQAPGKGLEWVSSISTRGDITSYRDSVKGRFTISRDNSKNTLYLQMNSLRAEDTAVYYCARQDYYTDYMGFAYWGQGTLVTVSSGGGGSGGGGSGGGGSAIQMTQSPSSLSASVGDRVTITCRASEDIYNGLAWYQQKPGKAPKLLIYGASSLQDGVPSRFSGSGSGTEFTLTISSLQPEDEATYYCAGPHKYPLTFGGGTKVEIK

SEQ ID NO: 360 - protein, 498 aa, Artificial Sequence
  Synthetic Polypeptide
EVQLLESGGGLVQPGGSLRLSCAASGFTFSNYDMAWVRQAPGKGLEWVSSISTRGDITSYRDSVKGRFTISRDNSKNTLYLQMNSLRAEDTAVYYCARQDYYTDYMGFAYWGQGTLVTVSSGGGGSGGGGSGGGGSAIQMTQSPSSLSASVGDRVTITCRASEDIYNGLAWYQQKPGKAPKLLIYGASSLQDGVPSRFSGSGSGTEFTLTISSLQPEDEATYYCAGPHKYPLTFGGGTKVEIKSGGGGSEVQLVESGGGLVQPGGSLKLSCAASGFTFNKYAMNWVRQAPGKGLEWVARIRSKYNNYATYYADSVKDRFTISRDDSKNTAYLQMNNLKTEDTAVYYCVRHGNFGNSYISYWAYWGQGTLVTVSSGGGGSGGGGSGGGGSQTVVTQEPSLTVSPGGTVTLTCGSSTGAVTSGNYPNWVQQKPGQAPRGLIGGTKFLAPGTPARFSGSLLGGKAALTLSGVQPEDEAEYYCVLWYSNRWVFGGGTKLTVL

SEQ ID NO: 361 - protein, 5 aa, Artificial Sequence
  Synthetic Polypeptide
NYDMA

SEQ ID NO: 362 - protein, 17 aa, Artificial Sequence
  Synthetic Polypeptide
SISTRGDITSYRDSVKG

SEQ ID NO: 363 - protein, 12 aa, Artificial Sequence
  Synthetic Polypeptide
QDYYTDYMGFAY

SEQ ID NO: 364 - protein, 11 aa, Artificial Sequence
  Synthetic Polypeptide
RASEDIYNGLA

SEQ ID NO: 365 - protein, 7 aa, Artificial Sequence
  Synthetic Polypeptide
GASSLQD

SEQ ID NO: 366 - protein, 9 aa, Artificial Sequence
  Synthetic Polypeptide
AGPHKYPLT

SEQ ID NO: 367 - protein, 121 aa, Artificial Sequence; identical to SEQ ID NO: 287
  Synthetic Polypeptide

SEQ ID NO: 368 - protein, 107 aa, Artificial Sequence
  Synthetic Polypeptide
AIQMTQSPSSLSASVGDRVTITCRASEDIYNGLAWYQQKPGKAPKLLIYGASSLQDGVPSRFSGSGSGTDFTLTISSMQPEDEATYYCAGPHKYPLTFGGGTKVEIK

SEQ ID NO: 369 - protein, 243 aa, Artificial Sequence
  Synthetic Polypeptide
EVQLLESGGGLVQPGRSLRLSCAASGFTFSNYDMAWVRQAPGKGLEWVSSISTRGDITSYRDSVKGRFTISRDNSKNTLYLQMNSLRAEDTAVYYCARQDYYTDYMGFAYWGQGTLVTVSSGGGGSGGGGSGGGGSAIQMTQSPSSLSASVGDRVTITCRASEDIYNGLAWYQQKPGKAPKLLIYGASSLQDGVPSRFSGSGSGTDFTLTISSMQPEDEATYYCAGPHKYPLTFGGGTKVEIK

SEQ ID NO: 370 - protein, 498 aa, Artificial Sequence
  Synthetic Polypeptide
EVQLLESGGGLVQPGRSLRLSCAASGFTFSNYDMAWVRQAPGKGLEWVSSISTRGDITSYRDSVKGRFTISRDNSKNTLYLQMNSLRAEDTAVYYCARQDYYTDYMGFAYWGQGTLVTVSSGGGGSGGGGSGGGGSAIQMTQSPSSLSASVGDRVTITCRASEDIYNGLAWYQQKPGKAPKLLIYGASSLQDGVPSRFSGSGSGTDFTLTISSMQPEDEATYYCAGPHKYPLTFGGGTKVEIKSGGGGSEVQLVESGGGLVQPGGSLKLSCAASGFTFNKYAMNWVRQAPGKGLEWVARIRSKYNNYATYYADSVKDRFTISRDDSKNTAYLQMNNLKTEDTAVYYCVRHGNFGNSYISYWAYWGQGTLVTVSSGGGGSGGGGSGGGGSQTVVTQEPSLTVSPGGTVTLTCGSSTGAVTSGNYPNWVQQKPGQAPRGLIGGTKFLAPGTPARFSGSLLGGKAALTLSGVQPEDEAEYYCVLWYSNRWVFGGGTKLTVL

SEQ ID NO: 371 - protein, 5 aa, Artificial Sequence
  Synthetic Polypeptide
NYDMA

SEQ ID NO: 372 - protein, 17 aa, Artificial Sequence
  Synthetic Polypeptide
SISTRGDITSYRDSVKG

SEQ ID NO: 373 - protein, 12 aa, Artificial Sequence
  Synthetic Polypeptide
QDYYTDYMGFAY

SEQ ID NO: 374 - protein, 11 aa, Artificial Sequence
  Synthetic Polypeptide
RASEDIYNGLA

SEQ ID NO: 375 - protein, 7 aa, Artificial Sequence
  Synthetic Polypeptide
GASSLQD

SEQ ID NO: 376 - protein, 9 aa, Artificial Sequence
  Synthetic Polypeptide
QQSRNYQQT

SEQ ID NO: 377 - protein, 121 aa, Artificial Sequence; identical to SEQ ID NO: 287
  Synthetic Polypeptide

SEQ ID NO: 378 - protein, 107 aa, Artificial Sequence
  Synthetic Polypeptide
AIQMTQSPSSLSASVGDRVTITCRASEDIYNGLAWYQQKPGKAPKLLIYGASSLQDGVPSRFSGSGSGTDFTLTISSMQPEDEATYYCQQSRNYQQTFGGGTKVEIK

SEQ ID NO: 379 - protein, 243 aa, Artificial Sequence
  Synthetic Polypeptide
EVQLLESGGGLVQPGRSLRLSCAASGFTFSNYDMAWVRQAPGKGLEWVSSISTRGDITSYRDSVKGRFTISRDNSKNTLYLQMNSLRAEDTAVYYCARQDYYTDYMGFAYWGQGTLVTVSSGGGGSGGGGSGGGGSAIQMTQSPSSLSASVGDRVTITCRASEDIYNGLAWYQQKPGKAPKLLIYGASSLQDGVPSRFSGSGSGTDFTLTISSMQPEDEATYYCQQSRNYQQTFGGGTKVEIK

SEQ ID NO: 380 - protein, 498 aa, Artificial Sequence
  Synthetic Polypeptide
EVQLLESGGGLVQPGRSLRLSCAASGFTFSNYDMAWVRQAPGKGLEWVSSISTRGDITSYRDSVKGRFTISRDNSKNTLYLQMNSLRAEDTAVYYCARQDYYTDYMGFAYWGQGTLVTVSSGGGGSGGGGSGGGGSAIQMTQSPSSLSASVGDRVTITCRASEDIYNGLAWYQQKPGKAPKLLIYGASSLQDGVPSRFSGSGSGTDFTLTISSMQPEDEATYYCQQSRNYQQTFGGGTKVEIKSGGGGSEVQLVESGGGLVQPGGSLKLSCAASGFTFNKYAMNWVRQAPGKGLEWVARIRSKYNNYATYYADSVKDRFTISRDDSKNTAYLQMNNLKTEDTAVYYCVRHGNFGNSYISYWAYWGQGTLVTVSSGGGGSGGGGSGGGGSQTVVTQEPSLTVSPGGTVTLTCGSSTGAVTSGNYPNWVQQKPGQAPRGLIGGTKFLAPGTPARFSGSLLGGKAALTLSGVQPEDEAEYYCVLWYSNRWVFGGGTKLTVL

SEQ ID NO: 381 - protein, 5 aa, Artificial Sequence
  Synthetic Polypeptide
NFDMA

SEQ ID NO: 382 - protein, 17 aa, Artificial Sequence
  Synthetic Polypeptide
SITTGGGDTYYADSVKG

SEQ ID NO: 383 - protein, 12 aa, Artificial Sequence
  Synthetic Polypeptide
HGYYDGYHLFDY

SEQ ID NO: 384 - protein, 11 aa, Artificial Sequence
  Synthetic Polypeptide
RASQGISNYLN

SEQ ID NO: 385 - protein, 7 aa, Artificial Sequence
  Synthetic Polypeptide
YTSNLQS

SEQ ID NO: 386 - protein, 9 aa, Artificial Sequence
  Synthetic Polypeptide
MGQTISSYT

SEQ ID NO: 387 - protein, 121 aa, Artificial Sequence
  Synthetic Polypeptide
EVQLVESGGGLVQPGGSLRLSCAASGFTFSNFDMAWVRQAPGKGLVWVSSITTGGGDTYYADSVKGRFTISRDNAKNTLYLQMDSLRAEDTAVYYCVRHGYYDGYHLFDYWGQGTLVTVSS

SEQ ID NO: 388 - protein, 107 aa, Artificial Sequence; identical to SEQ ID NO: 98
  Synthetic Polypeptide

SEQ ID NO: 389 - protein, 243 aa, Artificial Sequence
  Synthetic Polypeptide
EVQLVESGGGLVQPGGSLRLSCAASGFTFSNFDMAWVRQAPGKGLVWVSSITTGGGDTYYADSVKGRFTISRDNAKNTLYLQMDSLRAEDTAVYYCVRHGYYDGYHLFDYWGQGTLVTVSSGGGGSGGGGSGGGGSDIQMTQSPSSLSASVGDRVTITCRASQGISNYLNWYQQKPGKAPKPLIYYTSNLQSGVPSRFSGSGSGTDYTLTISSLQPEDFATYYCMGQTISSYTFGQGTKLEIK

SEQ ID NO: 390 - protein, 498 aa, Artificial Sequence
  Synthetic Polypeptide
EVQLVESGGGLVQPGGSLRLSCAASGFTFSNFDMAWVRQAPGKGLVWVSSITTGGGDTYYADSVKGRFTISRDNAKNTLYLQMDSLRAEDTAVYYCVRHGYYDGYHLFDYWGQGTLVTVSSGGGGSGGGGSGGGGSDIQMTQSPSSLSASVGDRVTITCRASQGISNYLNWYQQKPGKAPKPLIYYTSNLQSGVPSRFSGSGSGTDYTLTISSLQPEDFATYYCMGQTISSYTFGQGTKLEIKSGGGGSEVQLVESGGGLVQPGGSLKLSCAASGFTFNKYAMNWVRQAPGKGLEWVARIRSKYNNYATYYADSVKDRFTISRDDSKNTAYLQMNNLKTEDTAVYYCVRHGNFGNSYISYWAYWGQGTLVTVSSGGGGSGGGGSGGGGSQTVVTQEPSLTVSPGGTVTLTCGSSTGAVTSGNYPNWVQQKPGQAPRGLIGGTKFLAPGTPARFSGSLLGGKAALTLSGVQPEDEAEYYCVLWYSNRWVFGGGTKLTVL

SEQ ID NO: 391 - protein, 5 aa, Artificial Sequence
  Synthetic Polypeptide
NFDMA

SEQ ID NO: 392 - protein, 17 aa, Artificial Sequence
  Synthetic Polypeptide
SITTGGGDTYYADSVKG

SEQ ID NO: 393 - protein, 12 aa, Artificial Sequence
  Synthetic Polypeptide
HGYYDGYHLFDY

SEQ ID NO: 394 - protein, 11 aa, Artificial Sequence
  Synthetic Polypeptide
RASQGISNYLN

SEQ ID NO: 395 - protein, 7 aa, Artificial Sequence
  Synthetic Polypeptide
YTSNLQS

SEQ ID NO: 396 - protein, 9 aa, Artificial Sequence
  Synthetic Polypeptide
MGQTISSYT

SEQ ID NO: 397 - protein, 121 aa, Artificial Sequence
  Synthetic Polypeptide
EVQLVESGGGLVQPGGSLRLSCAASGFTFSNFDMAWVRQAPGKGLVWVSSITTGGGDTYYADSVKGRFTISRDNAKNTLYLQMNSLRAEDTAVYYCVRHGYYDGYHLFDYWGQGTLVTVSS

SEQ ID NO: 398 - protein, 107 aa, Artificial Sequence; identical to SEQ ID NO: 98
  Synthetic Polypeptide

SEQ ID NO: 399 - protein, 243 aa, Artificial Sequence
  Synthetic Polypeptide
EVQLVESGGGLVQPGGSLRLSCAASGFTFSNFDMAWVRQAPGKGLVWVSSITTGGGDTYYADSVKGRFTISRDNAKNTLYLQMNSLRAEDTAVYYCVRHGYYDGYHLFDYWGQGTLVTVSSGGGGSGGGGSGGGGSDIQMTQSPSSLSASVGDRVTITCRASQGISNYLNWYQQKPGKAPKPLIYYTSNLQSGVPSRFSGSGSGTDYTLTISSLQPEDFATYYCMGQTISSYTFGQGTKLEIK

SEQ ID NO: 400 - protein, 498 aa, Artificial Sequence
  Synthetic Polypeptide
EVQLVESGGGLVQPGGSLRLSCAASGFTFSNFDMAWVRQAPGKGLVWVSSITTGGGDTYYADSVKGRFTISRDNAKNTLYLQMNSLRAEDTAVYYCVRHGYYDGYHLFDYWGQGTLVTVSSGGGGSGGGGSGGGGSDIQMTQSPSSLSASVGDRVTITCRASQGISNYLNWYQQKPGKAPKPLIYYTSNLQSGVPSRFSGSGSGTDYTLTISSLQPEDFATYYCMGQTISSYTFGQGTKLEIKSGGGGSEVQLVESGGGLVQPGGSLKLSCAASGFTFNKYAMNWVRQAPGKGLEWVARIRSKYNNYATYYADSVKDRFTISRDDSKNTAYLQMNNLKTEDTAVYYCVRHGNFGNSYISYWAYWGQGTLVTVSSGGGGSGGGGSGGGGSQTVVTQEPSLTVSPGGTVTLTCGSSTGAVTSGNYPNWVQQKPGQAPRGLIGGTKFLAPGTPARFSGSLLGGKAALTLSGVQPEDEAEYYCVLWYSNRWVFGGGTKLTVL

SEQ ID NO: 401 - protein, 5 aa, Artificial Sequence
  Synthetic Polypeptide
NFDMA

SEQ ID NO: 402 - protein, 17 aa, Artificial Sequence
  Synthetic Polypeptide
SITTGGGDTYYADSVKG

SEQ ID NO: 403 - protein, 12 aa, Artificial Sequence
  Synthetic Polypeptide
HGYYDGYHLFDY

SEQ ID NO: 404 - protein, 11 aa, Artificial Sequence
  Synthetic Polypeptide
RASQGISNYLN

SEQ ID NO: 405 - protein, 7 aa, Artificial Sequence
  Synthetic Polypeptide
YTSNLQS

SEQ ID NO: 406 - protein, 9 aa, Artificial Sequence
  Synthetic Polypeptide
MGQTISSYT

SEQ ID NO: 407 - protein, 121 aa, Artificial Sequence
  Synthetic Polypeptide
EVQLVESGGGLVQPGGSLRLSCAASGFTFSNFDMAWVRQAPGKGLVWVSSITTGGGDTYYADSVKGRFTISRDNAKNTLYLQMDSLRSEDTAVYYCVRHGYYDGYHLFDYWGQGTLVTVSS

SEQ ID NO: 408 - protein, 107 aa, Artificial Sequence; identical to SEQ ID NO: 138
  Synthetic Polypeptide

SEQ ID NO: 409 - protein, 243 aa, Artificial Sequence
  Synthetic Polypeptide
EVQLVESGGGLVQPGGSLRLSCAASGFTFSNFDMAWVRQAPGKGLVWVSSITTGGGDTYYADSVKGRFTISRDNAKNTLYLQMDSLRSEDTAVYYCVRHGYYDGYHLFDYWGQGTLVTVSSGGGGSGGGGSGGGGSDIQMTQSPSSLSASVGDRVTISCRASQGISNYLNWYQQKPGKAPKPLIYYTSNLQSGVPSRFSGSGSGTDYTLTISSLQPEDFATYYCMGQTISSYTFGQGTKLEIK

SEQ ID NO: 410 - protein, 498 aa, Artificial Sequence
  Synthetic Polypeptide
EVQLVESGGGLVQPGGSLRLSCAASGFTFSNFDMAWVRQAPGKGLVWVSSITTGGGDTYYADSVKGRFTISRDNAKNTLYLQMDSLRSEDTAVYYCVRHGYYDGYHLFDYWGQGTLVTVSSGGGGSGGGGSGGGGSDIQMTQSPSSLSASVGDRVTISCRASQGISNYLNWYQQKPGKAPKPLIYYTSNLQSGVPSRFSGSGSGTDYTLTISSLQPEDFATYYCMGQTISSYTFGQGTKLEIKSGGGGSEVQLVESGGGLVQPGGSLKLSCAASGFTFNKYAMNWVRQAPGKGLEWVARIRSKYNNYATYYADSVKDRFTISRDDSKNTAYLQMNNLKTEDTAVYYCVRHGNFGNSYISYWAYWGQGTLVTVSSGGGGSGGGGSGGGGSQTVVTQEPSLTVSPGGTVTLTCGSSTGAVTSGNYPNWVQQKPGQAPRGLIGGTKFLAPGTPARFSGSLLGGKAALTLSGVQPEDEAEYYCVLWYSNRWVFGGGTKLTVL

SEQ ID NO: 411 - protein, 5 aa, Artificial Sequence
  Synthetic Polypeptide
NFDMA

SEQ ID NO: 412 - protein, 17 aa, Artificial Sequence
  Synthetic Polypeptide
SITTGGGDTYYADSVKG

SEQ ID NO: 413 - protein, 12 aa, Artificial Sequence
  Synthetic Polypeptide
HGYYDGYHLFDY

SEQ ID NO: 414 - protein, 11 aa, Artificial Sequence
  Synthetic Polypeptide
RASQGISNYLN

SEQ ID NO: 415 - protein, 7 aa, Artificial Sequence
  Synthetic Polypeptide
YTSNLQS

SEQ ID NO: 416 - protein, 9 aa, Artificial Sequence
  Synthetic Polypeptide
MGQTISSYT

SEQ ID NO: 417 - protein, 121 aa, Artificial Sequence
  Synthetic Polypeptide
EVQLVESGGGLVQPGRSLRLSCAASGFTFSNFDMAWVRQAPAKGLEWVSSITTGGGDTYYADSVKGRFTISRDNAKNTLYLQMNSLRAEDTAVYYCVRHGYYDGYHLFDYWGQGTLVTVSS

SEQ ID NO: 418 - protein, 107 aa, Artificial Sequence; identical to SEQ ID NO: 148
  Synthetic Polypeptide

SEQ ID NO: 419 - protein, 243 aa, Artificial Sequence
  Synthetic Polypeptide
EVQLVESGGGLVQPGRSLRLSCAASGFTFSNFDMAWVRQAPAKGLEWVSSITTGGGDTYYADSVKGRFTISRDNAKNTLYLQMNSLRAEDTAVYYCVRHGYYDGYHLFDYWGQGTLVTVSSGGGGSGGGGSGGGGSDIQMTQSPSSLSASVGDRVTITCRASQGISNYLNWYQQKPGKAPKPLIYYTSNLQSGVPSRFSGSGSGTDFTLTISSLQPEDFATYYCMGQTISSYTFGQGTKLEIK

SEQ ID NO: 420 - protein, 498 aa, Artificial Sequence
  Synthetic Polypeptide
EVQLVESGGGLVQPGRSLRLSCAASGFTFSNFDMAWVRQAPAKGLEWVSSITTGGGDTYYADSVKGRFTISRDNAKNTLYLQMNSLRAEDTAVYYCVRHGYYDGYHLFDYWGQGTLVTVSSGGGGSGGGGSGGGGSDIQMTQSPSSLSASVGDRVTITCRASQGISNYLNWYQQKPGKAPKPLIYYTSNLQSGVPSRFSGSGSGTDFTLTISSLQPEDFATYYCMGQTISSYTFGQGTKLEIKSGGGGSEVQLVESGGGLVQPGGSLKLSCAASGFTFNKYAMNWVRQAPGKGLEWVARIRSKYNNYATYYADSVKDRFTISRDDSKNTAYLQMNNLKTEDTAVYYCVRHGNFGNSYISYWAYWGQGTLVTVSSGGGGSGGGGSGGGGSQTVVTQEPSLTVSPGGTVTLTCGSSTGAVTSGNYPNWVQQKPGQAPRGLIGGTKFLAPGTPARFSGSLLGGKAALTLSGVQPEDEAEYYCVLWYSNRWVFGGGTKLTVL

SEQ ID NO: 421 - protein, 5 aa, Artificial Sequence
  Synthetic Polypeptide
NFDMA

SEQ ID NO: 422 - protein, 17 aa, Artificial Sequence
  Synthetic Polypeptide
SITTGGGDTYYADSVKG

SEQ ID NO: 423 - protein, 12 aa, Artificial Sequence
  Synthetic Polypeptide
HGYYDGYHLFDY

SEQ ID NO: 424 - protein, 11 aa, Artificial Sequence
  Synthetic Polypeptide
RASQGISNHLN

SEQ ID NO: 425 - protein, 7 aa, Artificial Sequence
  Synthetic Polypeptide
YTSNLQS

SEQ ID NO: 426 - protein, 9 aa, Artificial Sequence
  Synthetic Polypeptide
QQYFDRPYT

SEQ ID NO: 427 - protein, 121 aa, Artificial Sequence; identical to SEQ ID NO: 397
  Synthetic Polypeptide

SEQ ID NO: 428 - protein, 107 aa, Artificial Sequence
  Synthetic Polypeptide
DIQMTQSPSSLSASVGDRVTISCRASQGISNHLNWFQQKPGRAPKPLIYYTSNLQSGVPSRFSGSGSGTDFTLTISSLQPEDFATYYCQQYFDRPYTFGGGTKVEIK

SEQ ID NO: 429 - protein, 243 aa, Artificial Sequence
  Synthetic Polypeptide
EVQLVESGGGLVQPGGSLRLSCAASGFTFSNFDMAWVRQAPGKGLVWVSSITTGGGDTYYADSVKGRFTISRDNAKNTLYLQMNSLRAEDTAVYYCVRHGYYDGYHLFDYWGQGTLVTVSSGGGGSGGGGSGGGGSDIQMTQSPSSLSASVGDRVTISCRASQGISNHLNWFQQKPGRAPKPLIYYTSNLQSGVPSRFSGSGSGTDFTLTISSLQPEDFATYYCQQYFDRPYTFGGGTKVEIK

SEQ ID NO: 430 - protein, 498 aa, Artificial Sequence
  Synthetic Polypeptide
EVQLVESGGGLVQPGGSLRLSCAASGFTFSNFDMAWVRQAPGKGLVWVSSITTGGGDTYYADSVKGRFTISRDNAKNTLYLQMNSLRAEDTAVYYCVRHGYYDGYHLFDYWGQGTLVTVSSGGGGSGGGGSGGGGSDIQMTQSPSSLSASVGDRVTISCRASQGISNHLNWFQQKPGRAPKPLIYYTSNLQSGVPSRFSGSGSGTDFTLTISSLQPEDFATYYCQQYFDRPYTFGGGTKVEIKSGGGGSEVQLVESGGGLVQPGGSLKLSCAASGFTFNKYAMNWVRQAPGKGLEWVARIRSKYNNYATYYADSVKDRFTISRDDSKNTAYLQMNNLKTEDTAVYYCVRHGNFGNSYISYWAYWGQGTLVTVSSGGGGSGGGGSGGGGSQTVVTQEPSLTVSPGGTVTLTCGSSTGAVTSGNYPNWVQQKPGQAPRGLIGGTKFLAPGTPARFSGSLLGGKAALTLSGVQPEDEAEYYCVLWYSNRWVFGGGTKLTVL

SEQ ID NO: 431 - protein, 5 aa, Artificial Sequence
  Synthetic Polypeptide
NFDMA

SEQ ID NO: 432 - protein, 17 aa, Artificial Sequence
  Synthetic Polypeptide
SITTGGGDTYYADSVKG

SEQ ID NO: 433 - protein, 12 aa, Artificial Sequence
  Synthetic Polypeptide
HGYYDGYHLFDY

SEQ ID NO: 434 - protein, 11 aa, Artificial Sequence
  Synthetic Polypeptide
RASQGISNHLN

SEQ ID NO: 435 - protein, 7 aa, Artificial Sequence
  Synthetic Polypeptide
YTSNLQS

SEQ ID NO: 436 - protein, 9 aa, Artificial Sequence
  Synthetic Polypeptide
QQYFDRPYT

SEQ ID NO: 437 - protein, 121 aa, Artificial Sequence; identical to SEQ ID NO: 387
  Synthetic Polypeptide

SEQ ID NO: 438 - protein, 107 aa, Artificial Sequence
  Synthetic Polypeptide
DIQMTQSPSSLSASVGDRVTISCRASQGISNHLNWYQQKPGKAPKPLIYYTSNLQSGVPSRFSGSGSGTDYTLTISSLQPEDFATYYCQQYFDRPYTFGGGTKVEIK

SEQ ID NO: 439 - protein, 243 aa, Artificial Sequence
  Synthetic Polypeptide
EVQLVESGGGLVQPGGSLRLSCAASGFTFSNFDMAWVRQAPGKGLVWVSSITTGGGDTYYADSVKGRFTISRDNAKNTLYLQMDSLRAEDTAVYYCVRHGYYDGYHLFDYWGQGTLVTVSSGGGGSGGGGSGGGGSDIQMTQSPSSLSASVGDRVTISCRASQGISNHLNWYQQKPGKAPKPLIYYTSNLQSGVPSRFSGSGSGTDYTLTISSLQPEDFATYYCQQYFDRPYTFGGGTKVEIK

SEQ ID NO: 440 - protein, 498 aa, Artificial Sequence
  Synthetic Polypeptide
EVQLVESGGGLVQPGGSLRLSCAASGFTFSNFDMAWVRQAPGKGLVWVSSITTGGGDTYYADSVKGRFTISRDNAKNTLYLQMDSLRAEDTAVYYCVRHGYYDGYHLFDYWGQGTLVTVSSGGGGSGGGGSGGGGSDIQMTQSPSSLSASVGDRVTISCRASQGISNHLNWYQQKPGKAPKPLIYYTSNLQSGVPSRFSGSGSGTDYTLTISSLQPEDFATYYCQQYFDRPYTFGGGTKVEIKSGGGGSEVQLVESGGGLVQPGGSLKLSCAASGFTFNKYAMNWVRQAPGKGLEWVARIRSKYNNYATYYADSVKDRFTISRDDSKNTAYLQMNNLKTEDTAVYYCVRHGNFGNSYISYWAYWGQGTLVTVSSGGGGSGGGGSGGGGSQTVVTQEPSLTVSPGGTVTLTCGSSTGAVTSGNYPNWVQQKPGQAPRGLIGGTKFLAPGTPARFSGSLLGGKAALTLSGVQPEDEAEYYCVLWYSNRWVFGGGTKLTVL

SEQ ID NO: 441 - protein, 5 aa, Artificial Sequence
  Synthetic Polypeptide
NFDMA

SEQ ID NO: 442 - protein, 17 aa, Artificial Sequence
  Synthetic Polypeptide
SITTGGGDTYYADSVKG

SEQ ID NO: 443 - protein, 12 aa, Artificial Sequence
  Synthetic Polypeptide
HGYYDGYHLFDY

SEQ ID NO: 444 - protein, 11 aa, Artificial Sequence
  Synthetic Polypeptide
RASQGISNHLN

SEQ ID NO: 445 - protein, 7 aa, Artificial Sequence
  Synthetic Polypeptide
YTSNLQS

SEQ ID NO: 446 - protein, 9 aa, Artificial Sequence
  Synthetic Polypeptide
QQYFDRPYT

SEQ ID NO: 447 - protein, 121 aa, Artificial Sequence; identical to SEQ ID NO: 387
  Synthetic Polypeptide

SEQ ID NO: 448 - protein, 107 aa, Artificial Sequence
  Synthetic Polypeptide
DIQMTQSPSSLSASVGDRVTITCRASQGISNHLNWFQQKPGKAPKPLIYYTSNLQSGVPSRFSGSGSGTDFTLTISSLQPEDFATYYCQQYFDRPYTFGGGTKVEIK

SEQ ID NO: 449 - protein, 243 aa, Artificial Sequence
  Synthetic Polypeptide
EVQLVESGGGLVQPGGSLRLSCAASGFTFSNFDMAWVRQAPGKGLVWVSSITTGGGDTYYADSVKGRFTISRDNAKNTLYLQMDSLRAEDTAVYYCVRHGYYDGYHLFDYWGQGTLVTVSSGGGGSGGGGSGGGGSDIQMTQSPSSLSASVGDRVTITCRASQGISNHLNWFQQKPGKAPKPLIYYTSNLQSGVPSRFSGSGSGTDFTLTISSLQPEDFATYYCQQYFDRPYTFGGGTKVEIK

SEQ ID NO: 450 - protein, 498 aa, Artificial Sequence
  Synthetic Polypeptide
EVQLVESGGGLVQPGGSLRLSCAASGFTFSNFDMAWVRQAPGKGLVWVSSITTGGGDTYYADSVKGRFTISRDNAKNTLYLQMDSLRAEDTAVYYCVRHGYYDGYHLFDYWGQGTLVTVSSGGGGSGGGGSGGGGSDIQMTQSPSSLSASVGDRVTITCRASQGISNHLNWFQQKPGKAPKPLIYYTSNLQSGVPSRFSGSGSGTDFTLTISSLQPEDFATYYCQQYFDRPYTFGGGTKVEIKSGGGGSEVQLVESGGGLVQPGGSLKLSCAASGFTFNKYAMNWVRQAPGKGLEWVARIRSKYNNYATYYADSVKDRFTISRDDSKNTAYLQMNNLKTEDTAVYYCVRHGNFGNSYISYWAYWGQGTLVTVSSGGGGSGGGGSGGGGSQTVVTQEPSLTVSPGGTVTLTCGSSTGAVTSGNYPNWVQQKPGQAPRGLIGGTKFLAPGTPARFSGSLLGGKAALTLSGVQPEDEAEYYCVLWYSNRWVFGGGTKLTVL

SEQ ID NO: 451 - protein, 5 aa, Artificial Sequence
  Synthetic Polypeptide
NFDMA

SEQ ID NO: 452 - protein, 17 aa, Artificial Sequence
  Synthetic Polypeptide
SITTGGGDTYYADSVKG

SEQ ID NO: 453 - protein, 12 aa, Artificial Sequence
  Synthetic Polypeptide
HGYYDGYHLFDY

SEQ ID NO: 454 - protein, 11 aa, Artificial Sequence
  Synthetic Polypeptide
RASQGISNHLN

SEQ ID NO: 455 - protein, 7 aa, Artificial Sequence
  Synthetic Polypeptide
YTSNLQS

SEQ ID NO: 456 - protein, 9 aa, Artificial Sequence
  Synthetic Polypeptide
QQYFDRPYT

SEQ ID NO: 457 - protein, 121 aa, Artificial Sequence; identical to SEQ ID NO: 417
  Synthetic Polypeptide

SEQ ID NO: 458 - protein, 107 aa, Artificial Sequence
  Synthetic Polypeptide
DIQMTQSPSSLSASVGERVTITCRASQGISNHLNWYQQKPGKAPKSLIYYTSNLQSGVPSRFSGSGSGTDFTLTISSLQPEDFATYYCQQYFDRPYTFGGGTKVEIK

SEQ ID NO: 459 - protein, 243 aa, Artificial Sequence
  Synthetic Polypeptide
EVQLVESGGGLVQPGRSLRLSCAASGFTFSNFDMAWVRQAPAKGLEWVSSITTGGGDTYYADSVKGRFTISRDNAKNTLYLQMNSLRAEDTAVYYCVRHGYYDGYHLFDYWGQGTLVTVSSGGGGSGGGGSGGGGSDIQMTQSPSSLSASVGERVTITCRASQGISNHLNWYQQKPGKAPKSLIYYTSNLQSGVPSRFSGSGSGTDFTLTISSLQPEDFATYYCQQYFDRPYTFGGGTKVEIK

SEQ ID NO: 460 - protein, 498 aa, Artificial Sequence
  Synthetic Polypeptide
EVQLVESGGGLVQPGRSLRLSCAASGFTFSNFDMAWVRQAPAKGLEWVSSITTGGGDTYYADSVKGRFTISRDNAKNTLYLQMNSLRAEDTAVYYCVRHGYYDGYHLFDYWGQGTLVTVSSGGGGSGGGGSGGGGSDIQMTQSPSSLSASVGERVTITCRASQGISNHLNWYQQKPGKAPKSLIYYTSNLQSGVPSRFSGSGSGTDFTLTISSLQPEDFATYYCQQYFDRPYTFGGGTKVEIKSGGGGSEVQLVESGGGLVQPGGSLKLSCAASGFTFNKYAMNWVRQAPGKGLEWVARIRSKYNNYATYYADSVKDRFTISRDDSKNTAYLQMNNLKTEDTAVYYCVRHGNFGNSYISYWAYWGQGTLVTVSSGGGGSGGGGSGGGGSQTVVTQEPSLTVSPGGTVTLTCGSSTGAVTSGNYPNWVQQKPGQAPRGLIGGTKFLAPGTPARFSGSLLGGKAALTLSGVQPEDEAEYYCVLWYSNRWVFGGGTKLTVL

SEQ ID NO: 461 - protein, 5 aa, Artificial Sequence
  Synthetic Polypeptide
NFDMA

SEQ ID NO: 462 - protein, 17 aa, Artificial Sequence
  Synthetic Polypeptide
SITTGGGDTYYADSVKG

SEQ ID NO: 463 - protein, 12 aa, Artificial Sequence
  Synthetic Polypeptide
HGYYDGYHLFDY

SEQ ID NO: 464 - protein, 11 aa, Artificial Sequence
  Synthetic Polypeptide
RASQGISNHLN

SEQ ID NO: 465 - protein, 7 aa, Artificial Sequence
  Synthetic Polypeptide
YTSNLQS

SEQ ID NO: 466 - protein, 9 aa, Artificial Sequence
  Synthetic Polypeptide
QQYSNLPYT

SEQ ID NO: 467 - protein, 121 aa, Artificial Sequence; identical to SEQ ID NO: 397
  Synthetic Polypeptide

SEQ ID NO: 468 - protein, 107 aa, Artificial Sequence
  Synthetic Polypeptide
DIQMTQSPSSLSASVGDRVTISCRASQGISNHLNWFQQKPGRAPKPLIYYTSNLQSGVPSRFSGSGSGTDFTLTISSLQPEDFATYYCQQYSNLPYTFGGGTKVEIK

SEQ ID NO: 469 - protein, 243 aa, Artificial Sequence
  Synthetic Polypeptide
EVQLVESGGGLVQPGGSLRLSCAASGFTFSNFDMAWVRQAPGKGLVWVSSITTGGGDTYYADSVKGRFTISRDNAKNTLYLQMNSLRAEDTAVYYCVRHGYYDGYHLFDYWGQGTLVTVSSGGGGSGGGGSGGGGSDIQMTQSPSSLSASVGDRVTISCRASQGISNHLNWFQQKPGRAPKPLIYYTSNLQSGVPSRFSGSGSGTDFTLTISSLQPEDFATYYCQQYSNLPYTFGGGTKVEIK

SEQ ID NO: 470 - protein, 498 aa, Artificial Sequence
  Synthetic Polypeptide
EVQLVESGGGLVQPGGSLRLSCAASGFTFSNFDMAWVRQAPGKGLVWVSSITTGGGDTYYADSVKGRFTISRDNAKNTLYLQMNSLRAEDTAVYYCVRHGYYDGYHLFDYWGQGTLVTVSSGGGGSGGGGSGGGGSDIQMTQSPSSLSASVGDRVTISCRASQGISNHLNWFQQKPGRAPKPLIYYTSNLQSGVPSRFSGSGSGTDFTLTISSLQPEDFATYYCQQYSNLPYTFGGGTKVEIKSGGGGSEVQLVESGGGLVQPGGSLKLSCAASGFTFNKYAMNWVRQAPGKGLEWVARIRSKYNNYATYYADSVKDRFTISRDDSKNTAYLQMNNLKTEDTAVYYCVRHGNFGNSYISYWAYWGQGTLVTVSSGGGGSGGGGSGGGGSQTVVTQEPSLTVSPGGTVTLTCGSSTGAVTSGNYPNWVQQKPGQAPRGLIGGTKFLAPGTPARFSGSLLGGKAALTLSGVQPEDEAEYYCVLWYSNRWVFGGGTKLTVL

SEQ ID NO: 471 - protein, 5 aa, Artificial Sequence
  Synthetic Polypeptide
NFDMA

SEQ ID NO: 472 - protein, 17 aa, Artificial Sequence
  Synthetic Polypeptide
SITTGGGDTYYADSVKG

SEQ ID NO: 473 - protein, 12 aa, Artificial Sequence
  Synthetic Polypeptide
HGYYDGYHLFDY

SEQ ID NO: 474 - protein, 11 aa, Artificial Sequence
  Synthetic Polypeptide
RASQGISNHLN

SEQ ID NO: 475 - protein, 7 aa, Artificial Sequence
  Synthetic Polypeptide
YTSNLQS

SEQ ID NO: 476 - protein, 9 aa, Artificial Sequence
  Synthetic Polypeptide
QQYSNLPYT

SEQ ID NO: 477 - protein, 121 aa, Artificial Sequence; identical to SEQ ID NO: 387
  Synthetic Polypeptide

SEQ ID NO: 478 - protein, 107 aa, Artificial Sequence
  Synthetic Polypeptide
DIQMTQSPSSLSASVGDRVTISCRASQGISNHLNWYQQKPGKAPKPLIYYTSNLQSGVPSRFSGSGSGTDYTLTISSLQPEDFATYYCQQYSNLPYTFGGGTKVEIK

SEQ ID NO: 479 - protein, 243 aa, Artificial Sequence
  Synthetic Polypeptide
EVQLVESGGGLVQPGGSLRLSCAASGFTFSNFDMAWVRQAPGKGLVWVSSITTGGGDTYYADSVKGRFTISRDNAKNTLYLQMDSLRAEDTAVYYCVRHGYYDGYHLFDYWGQGTLVTVSSGGGGSGGGGSGGGGSDIQMTQSPSSLSASVGDRVTISCRASQGISNHLNWYQQKPGKAPKPLIYYTSNLQSGVPSRFSGSGSGTDYTLTISSLQPEDFATYYCQQYSNLPYTFGGGTKVEIK

SEQ ID NO: 480 - protein, 498 aa, Artificial Sequence
  Synthetic Polypeptide
EVQLVESGGGLVQPGGSLRLSCAASGFTFSNFDMAWVRQAPGKGLVWVSSITTGGGDTYYADSVKGRFTISRDNAKNTLYLQMDSLRAEDTAVYYCVRHGYYDGYHLFDYWGQGTLVTVSSGGGGSGGGGSGGGGSDIQMTQSPSSLSASVGDRVTISCRASQGISNHLNWYQQKPGKAPKPLIYYTSNLQSGVPSRFSGSGSGTDYTLTISSLQPEDFATYYCQQYSNLPYTFGGGTKVEIKSGGGGSEVQLVESGGGLVQPGGSLKLSCAASGFTFNKYAMNWVRQAPGKGLEWVARIRSKYNNYATYYADSVKDRFTISRDDSKNTAYLQMNNLKTEDTAVYYCVRHGNFGNSYISYWAYWGQGTLVTVSSGGGGSGGGGSGGGGSQTVVTQEPSLTVSPGGTVTLTCGSSTGAVTSGNYPNWVQQKPGQAPRGLIGGTKFLAPGTPARFSGSLLGGKAALTLSGVQPEDEAEYYCVLWYSNRWVFGGGTKLTVL

SEQ ID NO: 481 - protein, 5 aa, Artificial Sequence
  Synthetic Polypeptide
NFDMA

SEQ ID NO: 482 - protein, 17 aa, Artificial Sequence
  Synthetic Polypeptide
SITTGGGDTYYADSVKG

SEQ ID NO: 483 - protein, 12 aa, Artificial Sequence
  Synthetic Polypeptide
HGYYDGYHLFDY

SEQ ID NO: 484 - protein, 11 aa, Artificial Sequence
  Synthetic Polypeptide
RASQGISNHLN

SEQ ID NO: 485 - protein, 7 aa, Artificial Sequence
  Synthetic Polypeptide
YTSNLQS

SEQ ID NO: 486 - protein, 9 aa, Artificial Sequence
  Synthetic Polypeptide
QQYSNLPYT

SEQ ID NO: 487 - protein, 121 aa, Artificial Sequence; identical to SEQ ID NO: 417
  Synthetic Polypeptide

SEQ ID NO: 488 - protein, 107 aa, Artificial Sequence
  Synthetic Polypeptide
DIQMTQSPSSLSASVGERVTITCRASQGISNHLNWYQQKPGKAPKSLIYYTSNLQSGVPSRFSGSGSGTDFTLTISSLQPEDFATYYCQQYSNLPYTFGGGTKVEIK

SEQ ID NO: 489 - protein, 243 aa, Artificial Sequence
  Synthetic Polypeptide
EVQLVESGGGLVQPGRSLRLSCAASGFTFSNFDMAWVRQAPAKGLEWVSSITTGGGDTYYADSVKGRFTISRDNAKNTLYLQMNSLRAEDTAVYYCVRHGYYDGYHLFDYWGQGTLVTVSSGGGGSGGGGSGGGGSDIQMTQSPSSLSASVGERVTITCRASQGISNHLNWYQQKPGKAPKSLIYYTSNLQSGVPSRFSGSGSGTDFTLTISSLQPEDFATYYCQQYSNLPYTFGGGTKVEIK

SEQ ID NO: 490 - protein, 498 aa, Artificial Sequence
  Synthetic Polypeptide
EVQLVESGGGLVQPGRSLRLSCAASGFTFSNFDMAWVRQAPAKGLEWVSSITTGGGDTYYADSVKGRFTISRDNAKNTLYLQMNSLRAEDTAVYYCVRHGYYDGYHLFDYWGQGTLVTVSSGGGGSGGGGSGGGGSDIQMTQSPSSLSASVGERVTITCRASQGISNHLNWYQQKPGKAPKSLIYYTSNLQSGVPSRFSGSGSGTDFTLTISSLQPEDFATYYCQQYSNLPYTFGGGTKVEIKSGGGGSEVQLVESGGGLVQPGGSLKLSCAASGFTFNKYAMNWVRQAPGKGLEWVARIRSKYNNYATYYADSVKDRFTISRDDSKNTAYLQMNNLKTEDTAVYYCVRHGNFGNSYISYWAYWGQGTLVTVSSGGGGSGGGGSGGGGSQTVVTQEPSLTVSPGGTVTLTCGSSTGAVTSGNYPNWVQQKPGQAPRGLIGGTKFLAPGTPARFSGSLLGGKAALTLSGVQPEDEAEYYCVLWYSNRWVFGGGTKLTVL

SEQ ID NO: 491 - protein, 5 aa, Artificial Sequence
  Synthetic Polypeptide
NFDMA

SEQ ID NO: 492 - protein, 17 aa, Artificial Sequence
  Synthetic Polypeptide
SITTGGGDTYYADSVKG

SEQ ID NO: 493 - protein, 12 aa, Artificial Sequence
  Synthetic Polypeptide
HGYYDGYHLFDY

SEQ ID NO: 494 - protein, 11 aa, Artificial Sequence
  Synthetic Polypeptide
RASQGISNNLN

SEQ ID NO: 495 - protein, 7 aa, Artificial Sequence
  Synthetic Polypeptide
YTSNLQS

SEQ ID NO: 496 - protein, 9 aa, Artificial Sequence
  Synthetic Polypeptide
QQFTSLPYT

SEQ ID NO: 497 - protein, 121 aa, Artificial Sequence; identical to SEQ ID NO: 397
  Synthetic Polypeptide

SEQ ID NO: 498 - protein, 107 aa, Artificial Sequence
  Synthetic Polypeptide
DIQMTQSPSSMSASVGDRVTITCRASQGISNNLNWYQQKPGKAPKSLIYYTSNLQSGVPSRFSGSGSGTDYTLTISSLQPEDFATYYCQQFTSLPYTFGQGTKLEIK

SEQ ID NO: 499 - protein, 243 aa, Artificial Sequence
  Synthetic Polypeptide
EVQLVESGGGLVQPGGSLRLSCAASGFTFSNFDMAWVRQAPGKGLVWVSSITTGGGDTYYADSVKGRFTISRDNAKNTLYLQMNSLRAEDTAVYYCVRHGYYDGYHLFDYWGQGTLVTVSSGGGGSGGGGSGGGGSDIQMTQSPSSMSASVGDRVTITCRASQGISNNLNWYQQKPGKAPKSLIYYTSNLQSGVPSRFSGSGSGTDYTLTISSLQPEDFATYYCQQFTSLPYTFGQGTKLEIK

SEQ ID NO: 500 - protein, 498 aa, Artificial Sequence
  Synthetic Polypeptide
EVQLVESGGGLVQPGGSLRLSCAASGFTFSNFDMAWVRQAPGKGLVWVSSITTGGGDTYYADSVKGRFTISRDNAKNTLYLQMNSLRAEDTAVYYCVRHGYYDGYHLFDYWGQGTLVTVSSGGGGSGGGGSGGGGSDIQMTQSPSSMSASVGDRVTITCRASQGISNNLNWYQQKPGKAPKSLIYYTSNLQSGVPSRFSGSGSGTDYTLTISSLQPEDFATYYCQQFTSLPYTFGQGTKLEIKSGGGGSEVQLVESGGGLVQPGGSLKLSCAASGFTFNKYAMNWVRQAPGKGLEWVARIRSKYNNYATYYADSVKDRFTISRDDSKNTAYLQMNNLKTEDTAVYYCVRHGNFGNSYISYWAYWGQGTLVTVSSGGGGSGGGGSGGGGSQTVVTQEPSLTVSPGGTVTLTCGSSTGAVTSGNYPNWVQQKPGQAPRGLIGGTKFLAPGTPARFSGSLLGGKAALTLSGVQPEDEAEYYCVLWYSNRWVFGGGTKLTVL

SEQ ID NO: 501 - protein, 5 aa, Artificial Sequence
  Synthetic Polypeptide
NFDMA

SEQ ID NO: 502 - protein, 17 aa, Artificial Sequence
  Synthetic Polypeptide
SITTGGGDTYYADSVKG

SEQ ID NO: 503 - protein, 12 aa, Artificial Sequence
  Synthetic Polypeptide
HGYYDGYHLFDY

SEQ ID NO: 504 - protein, 11 aa, Artificial Sequence
  Synthetic Polypeptide
RANQGISNNLN

SEQ ID NO: 505 - protein, 7 aa, Artificial Sequence
  Synthetic Polypeptide
YTSNLQS

SEQ ID NO: 506 - protein, 9 aa, Artificial Sequence
  Synthetic Polypeptide
QQFTSLPYT

SEQ ID NO: 507 - protein, 121 aa, Artificial Sequence
  Synthetic Polypeptide
EVQLVESGGGLVQPGGSLRLSCAASGFTFSNFDMAWVRQAPGKGLVWVSSITTGGGDTYYADSVKGRFTISRDNAKSTLYLQMDSLRSEDTAVYYCVRHGYYDGYHLFDYWGQGTLVTVSS

SEQ ID NO: 508 - protein, 107 aa, Artificial Sequence
  Synthetic Polypeptide
DIQMTQSPSSLSASVGDRVTITCRANQGISNNLNWYQQKPGKAPKPLIYYTSNLQSGVPSRFSGSGSGTDYTLTISSLQPEDFATYYCQQFTSLPYTFGQGTKLEIK

SEQ ID NO: 509 - protein, 243 aa, Artificial Sequence
  Synthetic Polypeptide
EVQLVESGGGLVQPGGSLRLSCAASGFTFSNFDMAWVRQAPGKGLVWVSSITTGGGDTYYADSVKGRFTISRDNAKSTLYLQMDSLRSEDTAVYYCVRHGYYDGYHLFDYWGQGTLVTVSSGGGGSGGGGSGGGGSDIQMTQSPSSLSASVGDRVTITCRANQGISNNLNWYQQKPGKAPKPLIYYTSNLQSGVPSRFSGSGSGTDYTLTISSLQPEDFATYYCQQFTSLPYTFGQGTKLEIK

SEQ ID NO: 510 - protein, 498 aa, Artificial Sequence
  Synthetic Polypeptide
EVQLVESGGGLVQPGGSLRLSCAASGFTFSNFDMAWVRQAPGKGLVWVSSITTGGGDTYYADSVKGRFTISRDNAKSTLYLQMDSLRSEDTAVYYCVRHGYYDGYHLFDYWGQGTLVTVSSGGGGSGGGGSGGGGSDIQMTQSPSSLSASVGDRVTITCRANQGISNNLNWYQQKPGKAPKPLIYYTSNLQSGVPSRFSGSGSGTDYTLTISSLQPEDFATYYCQQFTSLPYTFGQGTKLEIKSGGGGSEVQLVESGGGLVQPGGSLKLSCAASGFTFNKYAMNWVRQAPGKGLEWVARIRSKYNNYATYYADSVKDRFTISRDDSKNTAYLQMNNLKTEDTAVYYCVRHGNFGNSYISYWAYWGQGTLVTVSSGGGGSGGGGSGGGGSQTVVTQEPSLTVSPGGTVTLTCGSSTGAVTSGNYPNWVQQKPGQAPRGLIGGTKFLAPGTPARFSGSLLGGKAALTLSGVQPEDEAEYYCVLWYSNRWVFGGGTKLTVL

SEQ ID NO: 511 - protein, 5 aa, Artificial Sequence
  Synthetic Polypeptide
NFDMA

SEQ ID NO: 512 - protein, 17 aa, Artificial Sequence
  Synthetic Polypeptide
SITTGGGDTYYADSVKG

SEQ ID NO: 513 - protein, 12 aa, Artificial Sequence
  Synthetic Polypeptide
HGYYDGYHLFDY

SEQ ID NO: 514 - protein, 11 aa, Artificial Sequence
  Synthetic Polypeptide
RASQGISNNLN

SEQ ID NO: 515 - protein, 7 aa, Artificial Sequence
  Synthetic Polypeptide
YTSNLQS

SEQ ID NO: 516 - protein, 9 aa, Artificial Sequence
  Synthetic Polypeptide
QQFTSLPYT

SEQ ID NO: 517 - protein, 121 aa, Artificial Sequence; identical to SEQ ID NO: 407
  Synthetic Polypeptide

SEQ ID NO: 518 - protein, 107 aa, Artificial Sequence; identical to SEQ ID NO: 498
  Synthetic Polypeptide

SEQ ID NO: 519 - protein, 243 aa, Artificial Sequence
  Synthetic Polypeptide
EVQLVESGGGLVQPGGSLRLSCAASGFTFSNFDMAWVRQAPGKGLVWVSSITTGGGDTYYADSVKGRFTISRDNAKNTLYLQMDSLRSEDTAVYYCVRHGYYDGYHLFDYWGQGTLVTVSSGGGGSGGGGSGGGGSDIQMTQSPSSMSASVGDRVTITCRASQGISNNLNWYQQKPGKAPKSLIYYTSNLQSGVPSRFSGSGSGTDYTLTISSLQPEDFATYYCQQFTSLPYTFGQGTKLEIK

SEQ ID NO: 520 - protein, 498 aa, Artificial Sequence
  Synthetic Polypeptide
EVQLVESGGGLVQPGGSLRLSCAASGFTFSNFDMAWVRQAPGKGLVWVSSITTGGGDTYYADSVKGRFTISRDNAKNTLYLQMDSLRSEDTAVYYCVRHGYYDGYHLFDYWGQGTLVTVSSGGGGSGGGGSGGGGSDIQMTQSPSSMSASVGDRVTITCRASQGISNNLNWYQQKPGKAPKSLIYYTSNLQSGVPSRFSGSGSGTDYTLTISSLQPEDFATYYCQQFTSLPYTFGQGTKLEIKSGGGGSEVQLVESGGGLVQPGGSLKLSCAASGFTFNKYAMNWVRQAPGKGLEWVARIRSKYNNYATYYADSVKDRFTISRDDSKNTAYLQMNNLKTEDTAVYYCVRHGNFGNSYISYWAYWGQGTLVTVSSGGGGSGGGGSGGGGSQTVVTQEPSLTVSPGGTVTLTCGSSTGAVTSGNYPNWVQQKPGQAPRGLIGGTKFLAPGTPARFSGSLLGGKAALTLSGVQPEDEAEYYCVLWYSNRWVFGGGTKLTVL

SEQ ID NO: 521 - protein, 5 aa, Artificial Sequence
  Synthetic Polypeptide
NFDMA

SEQ ID NO: 522 - protein, 17 aa, Artificial Sequence
  Synthetic Polypeptide
SITTGGGDTYYADSVKG

SEQ ID NO: 523 - protein, 12 aa, Artificial Sequence
  Synthetic Polypeptide
HGYYDGYHLFDY

SEQ ID NO: 524 - protein, 11 aa, Artificial Sequence
  Synthetic Polypeptide
RASQGISNNLN

SEQ ID NO: 525 - protein, 7 aa, Artificial Sequence
  Synthetic Polypeptide
YTSNLQS

SEQ ID NO: 526 - protein, 9 aa, Artificial Sequence
  Synthetic Polypeptide
QQFAHLPYT

SEQ ID NO: 527 - protein, 121 aa, Artificial Sequence; identical to SEQ ID NO: 407
  Synthetic Polypeptide

SEQ ID NO: 528 - protein, 107 aa, Artificial Sequence
  Synthetic Polypeptide
DIQMTQSPSSMSASVGDRVTITCRASQGISNNLNWYQQKPGKAPKSLIYYTSNLQSGVPSRFSGSGSGTDYTLTISSLQPEDFATYYCQQFAHLPYTFGQGTKLEIK

SEQ ID NO: 529 - protein, 243 aa, Artificial Sequence
  Synthetic Polypeptide
EVQLVESGGGLVQPGGSLRLSCAASGFTFSNFDMAWVRQAPGKGLVWVSSITTGGGDTYYADSVKGRFTISRDNAKNTLYLQMDSLRSEDTAVYYCVRHGYYDGYHLFDYWGQGTLVTVSSGGGGSGGGGSGGGGSDIQMTQSPSSMSASVGDRVTITCRASQGISNNLNWYQQKPGKAPKSLIYYTSNLQSGVPSRFSGSGSGTDYTLTISSLQPEDFATYYCQQFAHLPYTFGQGTKLEIK

SEQ ID NO: 530 - protein, 498 aa, Artificial Sequence
  Synthetic Polypeptide
EVQLVESGGGLVQPGGSLRLSCAASGFTFSNFDMAWVRQAPGKGLVWVSSITTGGGDTYYADSVKGRFTISRDNAKNTLYLQMDSLRSEDTAVYYCVRHGYYDGYHLFDYWGQGTLVTVSSGGGGSGGGGSGGGGSDIQMTQSPSSMSASVGDRVTITCRASQGISNNLNWYQQKPGKAPKSLIYYTSNLQSGVPSRFSGSGSGTDYTLTISSLQPEDFATYYCQQFAHLPYTFGQGTKLEIKSGGGGSEVQLVESGGGLVQPGGSLKLSCAASGFTFNKYAMNWVRQAPGKGLEWVARIRSKYNNYATYYADSVKDRFTISRDDSKNTAYLQMNNLKTEDTAVYYCVRHGNFGNSYISYWAYWGQGTLVTVSSGGGGSGGGGSGGGGSQTVVTQEPSLTVSPGGTVTLTCGSSTGAVTSGNYPNWVQQKPGQAPRGLIGGTKFLAPGTPARFSGSLLGGKAALTLSGVQPEDEAEYYCVLWYSNRWVFGGGTKLTVL

SEQ ID NO: 531 - protein, 14 aa, Artificial Sequence
  Synthetic Polypeptide
GSSTGAVTSGYYPN

SEQ ID NO: 532 - protein, 7 aa, Artificial Sequence
  Synthetic Polypeptide
GTKFLAP

SEQ ID NO: 533 - protein, 9 aa, Artificial Sequence
  Synthetic Polypeptide
ALWYSNRWV

SEQ ID NO: 534 - protein, 5 aa, Artificial Sequence
  Synthetic Polypeptide
IYAMN

SEQ ID NO: 535 - protein, 19 aa, Artificial Sequence
  Synthetic Polypeptide
RIRSKYNNYATYYADSVKS

SEQ ID NO: 536 - protein, 14 aa, Artificial Sequence
  Synthetic Polypeptide
HGNFGNSYVSFFAY

SEQ ID NO: 537 - protein, 125 aa, Artificial Sequence
  Synthetic Polypeptide
EVQLVESGGGLVQPGGSLKLSCAASGFTFNIYAMNWVRQAPGKGLEWVARIRSKYNNYATYYADSVKSRFTISRDDSKNTAYLQMNNLKTEDTAVYYCVRHGNFGNSYVSFFAYWGQGTLVTVSS

SEQ ID NO: 538 - protein, 125 aa, Artificial Sequence
  Synthetic Polypeptide
EVQLLESGGGLVQPGGSLKLSCAASGFTFNIYAMNWVRQAPGKGLEWVARIRSKYNNYATYYADSVKSRFTISRDDSKNTAYLQMNNLKTEDTAVYYCVRHGNFGNSYVSFFAYWGQGTLVTVSS

SEQ ID NO: 539 - protein, 109 aa, Artificial Sequence
  Synthetic Polypeptide
QTVVTQEPSLTVSPGGTVTLTCGSSTGAVTSGYYPNWVQQKPGQAPRGLIGGTKFLAPGTPARFSGSLLGGKAALTLSGVQPEDEAEYYCALWYSNRWVFGGGTKLTVL

SEQ ID NO: 540 - protein, 249 aa, Artificial Sequence
  Synthetic Polypeptide
EVQLVESGGGLVQPGGSLKLSCAASGFTFNIYAMNWVRQAPGKGLEWVARIRSKYNNYATYYADSVKSRFTISRDDSKNTAYLQMNNLKTEDTAVYYCVRHGNFGNSYVSFFAYWGQGTLVTVSSGGGGSGGGGSGGGGSQTVVTQEPSLTVSPGGTVTLTCGSSTGAVTSGYYPNWVQQKPGQAPRGLIGGTKFLAPGTPARFSGSLLGGKAALTLSGVQPEDEAEYYCALWYSNRWVFGGGTKLTVL

SEQ ID NO: 541 - protein, 249 aa, Artificial Sequence
  Synthetic Polypeptide
EVQLLESGGGLVQPGGSLKLSCAASGFTFNIYAMNWVRQAPGKGLEWVARIRSKYNNYATYYADSVKSRFTISRDDSKNTAYLQMNNLKTEDTAVYYCVRHGNFGNSYVSFFAYWGQGTLVTVSSGGGGSGGGGSGGGGSELVVTQEPSLTVSPGGTVTLTCGSSTGAVTSGYYPNWVQQKPGQAPRGLIGGTKFLAPGTPARFSGSLLGGKAALTLSGVQPEDEAEYYCALWYSNRWVFGGGTKLTVL

SEQ ID NO: 542 - protein, 14 aa, Artificial Sequence
  Synthetic Polypeptide
GSSTGAVTSGYYPN

SEQ ID NO: 543 - protein, 7 aa, Artificial Sequence
  Synthetic Polypeptide
GTKFLAP

SEQ ID NO: 544 - protein, 9 aa, Artificial Sequence
  Synthetic Polypeptide
ALWYSNRWV

SEQ ID NO: 545 - protein, 5 aa, Artificial Sequence
  Synthetic Polypeptide
KYAMN

SEQ ID NO: 546 - protein, 19 aa, Artificial Sequence
  Synthetic Polypeptide
RIRSKYNNYATYYADSVKD

SEQ ID NO: 547 - protein, 14 aa, Artificial Sequence
  Synthetic Polypeptide
HGNFGNSYISYWAY

SEQ ID NO: 548 - protein, 125 aa, Artificial Sequence
  Synthetic Polypeptide
EVQLVESGGGLVQPGGSLKLSCAASGFTFNKYAMNWVRQAPGKGLEWVARIRSKYNNYATYYADSVKDRFTISRDDSKNTAYLQMNNLKTEDTAVYYCVRHGNFGNSYISYWAYWGQGTLVTVSS

SEQ ID NO: 549 - protein, 125 aa, Artificial Sequence
  Synthetic Polypeptide
EVQLLESGGGLVQPGGSLKLSCAASGFTFNKYAMNWVRQAPGKGLEWVARIRSKYNNYATYYADSVKDRFTISRDDSKNTAYLQMNNLKTEDTAVYYCVRHGNFGNSYISYWAYWGQGTLVTVSS

SEQ ID NO: 550 - protein, 109 aa, Artificial Sequence; identical to SEQ ID NO: 539
  Synthetic Polypeptide

SEQ ID NO: 551 - protein, 109 aa, Artificial Sequence
  Synthetic Polypeptide
ELVVTQEPSLTVSPGGTVTLTCGSSTGAVTSGYYPNWVQQKPGQAPRGLIGGTKFLAPGTPARFSGSLLGGKAALTLSGVQPEDEAEYYCALWYSNRWVFGGGTKLTVL

SEQ ID NO: 552 - protein, 249 aa, Artificial Sequence
  Synthetic Polypeptide
EVQLVESGGGLVQPGGSLKLSCAASGFTFNKYAMNWVRQAPGKGLEWVARIRSKYNNYATYYADSVKDRFTISRDDSKNTAYLQMNNLKTEDTAVYYCVRHGNFGNSYISYWAYWGQGTLVTVSSGGGGSGGGGSGGGGSQTVVTQEPSLTVSPGGTVTLTCGSSTGAVTSGYYPNWVQQKPGQAPRGLIGGTKFLAPGTPARFSGSLLGGKAALTLSGVQPEDEAEYYCALWYSNRWVFGGGTKLTVL

SEQ ID NO: 553 - protein, 249 aa, Artificial Sequence
  Synthetic Polypeptide
EVQLLESGGGLVQPGGSLKLSCAASGFTFNKYAMNWVRQAPGKGLEWVARIRSKYNNYATYYADSVKDRFTISRDDSKNTAYLQMNNLKTEDTAVYYCVRHGNFGNSYISYWAYWGQGTLVTVSSGGGGSGGGGSGGGGSELVVTQEPSLTVSPGGTVTLTCGSSTGAVTSGYYPNWVQQKPGQAPRGLIGGTKFLAPGTPARFSGSLLGGKAALTLSGVQPEDEAEYYCALWYSNRWVFGGGTKLTVL

SEQ ID NO: 554 - protein, 14 aa, Artificial Sequence
  Synthetic Polypeptide
GSSTGAVTSGYYPN

SEQ ID NO: 555 - protein, 7 aa, Artificial Sequence
  Synthetic Polypeptide
GTKFLAP

SEQ ID NO: 556 - protein, 9 aa, Artificial Sequence
  Synthetic Polypeptide
ALWYSNRWV

SEQ ID NO: 557 - protein, 5 aa, Artificial Sequence
  Synthetic Polypeptide
SYAMN

SEQ ID NO: 558 - protein, 19 aa, Artificial Sequence
  Synthetic Polypeptide
RIRSKYNNYATYYADSVKG

SEQ ID NO: 559 - protein, 14 aa, Artificial Sequence
  Synthetic Polypeptide
HGNFGNSYLSFWAY

SEQ ID NO: 560 - protein, 125 aa, Artificial Sequence
  Synthetic Polypeptide
EVQLVESGGGLEQPGGSLKLSCAASGFTFNSYAMNWVRQAPGKGLEWVARIRSKYNNYATYYADSVKGRFTISRDDSKNTAYLQMNNLKTEDTAVYYCVRHGNFGNSYLSFWAYWGQGTLVTVSS

SEQ ID NO: 561 - protein, 125 aa, Artificial Sequence
  Synthetic Polypeptide
EVQLLESGGGLEQPGGSLKLSCAASGFTFNSYAMNWVRQAPGKGLEWVARIRSKYNNYATYYADSVKGRFTISRDDSKNTAYLQMNNLKTEDTAVYYCVRHGNFGNSYLSFWAYWGQGTLVTVSS

SEQ ID NO: 562 - protein, 109 aa, Artificial Sequence; identical to SEQ ID NO: 539
  Synthetic Polypeptide

SEQ ID NO: 563 - protein, 249 aa, Artificial Sequence
  Synthetic Polypeptide
EVQLVESGGGLEQPGGSLKLSCAASGFTFNSYAMNWVRQAPGKGLEWVARIRSKYNNYATYYADSVKGRFTISRDDSKNTAYLQMNNLKTEDTAVYYCVRHGNFGNSYLSFWAYWGQGTLVTVSSGGGGSGGGGSGGGGSQTVVTQEPSLTVSPGGTVTLTCGSSTGAVTSGYYPNWVQQKPGQAPRGLIGGTKFLAPGTPARFSGSLLGGKAALTLSGVQPEDEAEYYCALWYSNRWVFGGGTKLTVL

SEQ ID NO: 564 - protein, 249 aa, Artificial Sequence
  Synthetic Polypeptide
EVQLLESGGGLEQPGGSLKLSCAASGFTFNSYAMNWVRQAPGKGLEWVARIRSKYNNYATYYADSVKGRFTISRDDSKNTAYLQMNNLKTEDTAVYYCVRHGNFGNSYLSFWAYWGQGTLVTVSSGGGGSGGGGSGGGGSELVVTQEPSLTVSPGGTVTLTCGSSTGAVTSGYYPNWVQQKPGQAPRGLIGGTKFLAPGTPARFSGSLLGGKAALTLSGVQPEDEAEYYCALWYSNRWVFGGGTKLTVL

SEQ ID NO: 565 - protein, 14 aa, Artificial Sequence
  Synthetic Polypeptide
GSSTGAVTSGYYPN

SEQ ID NO: 566 - protein, 7 aa, Artificial Sequence
  Synthetic Polypeptide
GTKFLAP

SEQ ID NO: 567 - protein, 9 aa, Artificial Sequence
  Synthetic Polypeptide
ALWYSNRWV

SEQ ID NO: 568 - protein, 5 aa, Artificial Sequence
  Synthetic Polypeptide
RYAMN

SEQ ID NO: 569 - protein, 19 aa, Artificial Sequence
  Synthetic Polypeptide
RIRSKYNNYATYYADSVKG

SEQ ID NO: 570 - protein, 14 aa, Artificial Sequence
  Synthetic Polypeptide
HGNFGNSYLSYFAY

SEQ ID NO: 571 - protein, 125 aa, Artificial Sequence
  Synthetic Polypeptide
EVQLVESGGGLVQPGGSLKLSCAASGFTFNRYAMNWVRQAPGKGLEWVARIRSKYNNYATYYADSVKGRFTISRDDSKNTAYLQMNNLKTEDTAVYYCVRHGNFGNSYLSYFAYWGQGTLVTVSS

SEQ ID NO: 572 - protein, 125 aa, Artificial Sequence
  Synthetic Polypeptide
EVQLLESGGGLVQPGGSLKLSCAASGFTFNRYAMNWVRQAPGKGLEWVARIRSKYNNYATYYADSVKGRFTISRDDSKNTAYLQMNNLKTEDTAVYYCVRHGNFGNSYLSYFAYWGQGTLVTVSS

SEQ ID NO: 573 - protein, 109 aa, Artificial Sequence; identical to SEQ ID NO: 539
  Synthetic Polypeptide

SEQ ID NO: 574 - protein, 249 aa, Artificial Sequence
  Synthetic Polypeptide
EVQLVESGGGLVQPGGSLKLSCAASGFTFNRYAMNWVRQAPGKGLEWVARIRSKYNNYATYYADSVKGRFTISRDDSKNTAYLQMNNLKTEDTAVYYCVRHGNFGNSYLSYFAYWGQGTLVTVSSGGGGSGGGGSGGGGSQTVVTQEPSLTVSPGGTVTLTCGSSTGAVTSGYYPNWVQQKPGQAPRGLIGGTKFLAPGTPARFSGSLLGGKAALTLSGVQPEDEAEYYCALWYSNRWVFGGGTKLTVL

SEQ ID NO: 575 - protein, 249 aa, Artificial Sequence
  Synthetic Polypeptide
EVQLLESGGGLVQPGGSLKLSCAASGFTFNRYAMNWVRQAPGKGLEWVARIRSKYNNYATYYADSVKGRFTISRDDSKNTAYLQMNNLKTEDTAVYYCVRHGNFGNSYLSYFAYWGQGTLVTVSSGGGGSGGGGSGGGGSELVVTQEPSLTVSPGGTVTLTCGSSTGAVTSGYYPNWVQQKPGQAPRGLIGGTKFLAPGTPARFSGSLLGGKAALTLSGVQPEDEAEYYCALWYSNRWVFGGGTKLTVL

SEQ ID NO: 576 - protein, 14 aa, Artificial Sequence
  Synthetic Polypeptide
RSSTGAVTSGYYPN

SEQ ID NO: 577 - protein, 7 aa, Artificial Sequence
  Synthetic Polypeptide
ATDMRPS

SEQ ID NO: 578 - protein, 9 aa, Artificial Sequence
  Synthetic Polypeptide
ALWYSNRWV

SEQ ID NO: 579 - protein, 5 aa, Artificial Sequence
  Synthetic Polypeptide
VYAMN

SEQ ID NO: 580 - protein, 19 aa, Artificial Sequence
  Synthetic Polypeptide
RIRSKYNNYATYYADSVKK

SEQ ID NO: 581 - protein, 14 aa, Artificial Sequence
  Synthetic Polypeptide
HGNFGNSYLSWWAY

SEQ ID NO: 582 - protein, 125 aa, Artificial Sequence
  Synthetic Polypeptide
EVQLVESGGGLVQPGGSLKLSCAASGFTFNVYAMNWVRQAPGKGLEWVARIRSKYNNYATYYADSVKKRFTISRDDSKNTAYLQMNNLKTEDTAVYYCVRHGNFGNSYLSWWAYWGQGTLVTVSS

SEQ ID NO: 583 - protein, 125 aa, Artificial Sequence
  Synthetic Polypeptide
EVQLLESGGGLVQPGGSLKLSCAASGFTFNVYAMNWVRQAPGKGLEWVARIRSKYNNYATYYADSVKKRFTISRDDSKNTAYLQMNNLKTEDTAVYYCVRHGNFGNSYLSWWAYWGQGTLVTVSS

SEQ ID NO: 584 - protein, 109 aa, Artificial Sequence
  Synthetic Polypeptide
QTVVTQEPSLTVSPGGTVTLTCRSSTGAVTSGYYPNWVQQKPGQAPRGLIGATDMRPSGTPARFSGSLLGGKAALTLSGVQPEDEAEYYCALWYSNRWVFGGGTKLTVL

SEQ ID NO: 585 - protein, 109 aa, Artificial Sequence
  Synthetic Polypeptide
ELVVTQEPSLTVSPGGTVTLTCRSSTGAVTSGYYPNWVQQKPGQAPRGLIGATDMRPSGTPARFSGSLLGGKAALTLSGVQPEDEAEYYCALWYSNRWVFGGGTKLTVL

SEQ ID NO: 586 - protein, 249 aa, Artificial Sequence
  Synthetic Polypeptide
EVQLVESGGGLVQPGGSLKLSCAASGFTFNVYAMNWVRQAPGKGLEWVARIRSKYNNYATYYADSVKKRFTISRDDSKNTAYLQMNNLKTEDTAVYYCVRHGNFGNSYLSWWAYWGQGTLVTVSSGGGGSGGGGSGGGGSQTVVTQEPSLTVSPGGTVTLTCRSSTGAVTSGYYPNWVQQKPGQAPRGLIGATDMRPSGTPARFSGSLLGGKAALTLSGVQPEDEAEYYCALWYSNRWVFGGGTKLTVL

SEQ ID NO: 587 - protein, 249 aa, Artificial Sequence
  Synthetic Polypeptide
EVQLLESGGGLVQPGGSLKLSCAASGFTFNVYAMNWVRQAPGKGLEWVARIRSKYNNYATYYADSVKKRFTISRDDSKNTAYLQMNNLKTEDTAVYYCVRHGNFGNSYLSWWAYWGQGTLVTVSSGGGGSGGGGSGGGGSELVVTQEPSLTVSPGGTVTLTCRSSTGAVTSGYYPNWVQQKPGQAPRGLIGATDMRPSGTPARFSGSLLGGKAALTLSGVQPEDEAEYYCALWYSNRWVFGGGTKLTVL

SEQ ID NO: 588 - protein, 14 aa, Artificial Sequence
  Synthetic Polypeptide
GSSTGAVTSGYYPN

SEQ ID NO: 589 - protein, 7 aa, Artificial Sequence
  Synthetic Polypeptide
GTKFLAP

SEQ ID NO: 590 - protein, 9 aa, Artificial Sequence
  Synthetic Polypeptide
ALWYSNRWV

SEQ ID NO: 591 - protein, 5 aa, Artificial Sequence
  Synthetic Polypeptide
KYAMN

SEQ ID NO: 592 - protein, 19 aa, Artificial Sequence
  Synthetic Polypeptide
RIRSKYNNYATYYADSVKS

SEQ ID NO: 593 - protein, 14 aa, Artificial Sequence
  Synthetic Polypeptide
HGNFGNSYTSYYAY

SEQ ID NO: 594 - protein, 125 aa, Artificial Sequence
  Synthetic Polypeptide
EVQLVESGGGLVQPGGSLKLSCAASGFTFNKYAMNWVRQAPGKGLEWVARIRSKYNNYATYYADSVKSRFTISRDDSKNTAYLQMNNLKTEDTAVYYCVRHGNFGNSYTSYYAYWGQGTLVTVSS

SEQ ID NO: 595 - protein, 125 aa, Artificial Sequence
  Synthetic Polypeptide
EVQLLESGGGLVQPGGSLKLSCAASGFTFNKYAMNWVRQAPGKGLEWVARIRSKYNNYATYYADSVKSRFTISRDDSKNTAYLQMNNLKTEDTAVYYCVRHGNFGNSYTSYYAYWGQGTLVTVSS

SEQ ID NO: 596 - protein, 109 aa, Artificial Sequence; identical to SEQ ID NO: 539
  Synthetic Polypeptide

SEQ ID NO: 597 - protein, 249 aa, Artificial Sequence
  Synthetic Polypeptide
EVQLVESGGGLVQPGGSLKLSCAASGFTFNKYAMNWVRQAPGKGLEWVARIRSKYNNYATYYADSVKSRFTISRDDSKNTAYLQMNNLKTEDTAVYYCVRHGNFGNSYTSYYAYWGQGTLVTVSSGGGGSGGGGSGGGGSQTVVTQEPSLTVSPGGTVTLTCGSSTGAVTSGYYPNWVQQKPGQAPRGLIGGTKFLAPGTPARFSGSLLGGKAALTLSGVQPEDEAEYYCALWYSNRWVFGGGTKLTVL

SEQ ID NO: 598 - protein, 249 aa, Artificial Sequence
  Synthetic Polypeptide
EVQLLESGGGLVQPGGSLKLSCAASGFTFNKYAMNWVRQAPGKGLEWVARIRSKYNNYATYYADSVKSRFTISRDDSKNTAYLQMNNLKTEDTAVYYCVRHGNFGNSYTSYYAYWGQGTLVTVSSGGGGSGGGGSGGGGSELVVTQEPSLTVSPGGTVTLTCGSSTGAVTSGYYPNWVQQKPGQAPRGLIGGTKFLAPGTPARFSGSLLGGKAALTLSGVQPEDEAEYYCALWYSNRWVFGGGTKLTVL

SEQ ID NO: 599 - protein, 14 aa, Artificial Sequence
  Synthetic Polypeptide
RSSTGAVTSGYYPN

SEQ ID NO: 600 - protein, 7 aa, Artificial Sequence
  Synthetic Polypeptide
ATDMRPS

SEQ ID NO: 601 - protein, 9 aa, Artificial Sequence
  Synthetic Polypeptide
ALWYSNRWV

SEQ ID NO: 602 - protein, 5 aa, Artificial Sequence
  Synthetic Polypeptide
GYAMN

SEQ ID NO: 603 - protein, 19 aa, Artificial Sequence
  Synthetic Polypeptide
RIRSKYNNYATYYADSVKE

SEQ ID NO: 604 - protein, 14 aa, Artificial Sequence
  Synthetic Polypeptide
HRNFGNSYLSWFAY

SEQ ID NO: 605 - protein, 125 aa, Artificial Sequence
  Synthetic Polypeptide
EVQLVESGGGLVQPGGSLKLSCAASGFTFNGYAMNWVRQAPGKGLEWVARIRSKYNNYATYYADSVKERFTISRDDSKNTAYLQMNNLKTEDTAVYYCVRHRNFGNSYLSWFAYWGQGTLVTVSS

SEQ ID NO: 606 - protein, 125 aa, Artificial Sequence
  Synthetic Polypeptide
EVQLLESGGGLVQPGGSLKLSCAASGFTFNGYAMNWVRQAPGKGLEWVARIRSKYNNYATYYADSVKERFTISRDDSKNTAYLQMNNLKTEDTAVYYCVRHRNFGNSYLSWFAYWGQGTLVTVSS

SEQ ID NO: 607 - protein, 109 aa, Artificial Sequence; identical to SEQ ID NO: 584
  Synthetic Polypeptide

SEQ ID NO: 608 - protein, 249 aa, Artificial Sequence
  Synthetic Polypeptide
EVQLVESGGGLVQPGGSLKLSCAASGFTFNGYAMNWVRQAPGKGLEWVARIRSKYNNYATYYADSVKERFTISRDDSKNTAYLQMNNLKTEDTAVYYCVRHRNFGNSYLSWFAYWGQGTLVTVSSGGGGSGGGGSGGGGSQTVVTQEPSLTVSPGGTVTLTCRSSTGAVTSGYYPNWVQQKPGQAPRGLIGATDMRPSGTPARFSGSLLGGKAALTLSGVQPEDEAEYYCALWYSNRWVFGGGTKLTVL

SEQ ID NO: 609 - protein, 249 aa, Artificial Sequence
  Synthetic Polypeptide
EVQLLESGGGLVQPGGSLKLSCAASGFTFNGYAMNWVRQAPGKGLEWVARIRSKYNNYATYYADSVKERFTISRDDSKNTAYLQMNNLKTEDTAVYYCVRHRNFGNSYLSWFAYWGQGTLVTVSSGGGGSGGGGSGGGGSELVVTQEPSLTVSPGGTVTLTCRSSTGAVTSGYYPNWVQQKPGQAPRGLIGATDMRPSGTPARFSGSLLGGKAALTLSGVQPEDEAEYYCALWYSNRWVFGGGTKLTVL

SEQ ID NO: 610 - protein, 14 aa, Artificial Sequence
  Synthetic Polypeptide
GSSTGAVTSGYYPN

SEQ ID NO: 611 - protein, 7 aa, Artificial Sequence
  Synthetic Polypeptide
GTKFLAP

SEQ ID NO: 612 - protein, 9 aa, Artificial Sequence
  Synthetic Polypeptide
ALWYSNRWV

SEQ ID NO: 613 - protein, 5 aa, Artificial Sequence
  Synthetic Polypeptide
VYAMN

SEQ ID NO: 614 - protein, 19 aa, Artificial Sequence
  Synthetic Polypeptide
RIRSKYNNYATYYADSVKK

SEQ ID NO: 615 - protein, 14 aa, Artificial Sequence
  Synthetic Polypeptide
HGNFGNSYISWWAY

SEQ ID NO: 616 - protein, 125 aa, Artificial Sequence
  Synthetic Polypeptide
EVQLVESGGGLVQPGGSLKLSCAASGFTFNVYAMNWVRQAPGKGLEWVARIRSKYNNYATYYADSVKKRFTISRDDSKNTAYLQMNNLKTEDTAVYYCVRHGNFGNSYISWWAYWGQGTLVTVSS

SEQ ID NO: 617 - protein, 125 aa, Artificial Sequence
  Synthetic Polypeptide
EVQLLESGGGLVQPGGSLKLSCAASGFTFNVYAMNWVRQAPGKGLEWVARIRSKYNNYATYYADSVKKRFTISRDDSKNTAYLQMNNLKTEDTAVYYCVRHGNFGNSYISWWAYWGQGTLVTVSS

SEQ ID NO: 618 - protein, 109 aa, Artificial Sequence; identical to SEQ ID NO: 539
  Synthetic Polypeptide

SEQ ID NO: 619 - protein, 249 aa, Artificial Sequence
  Synthetic Polypeptide
EVQLVESGGGLVQPGGSLKLSCAASGFTFNVYAMNWVRQAPGKGLEWVARIRSKYNNYATYYADSVKKRFTISRDDSKNTAYLQMNNLKTEDTAVYYCVRHGNFGNSYISWWAYWGQGTLVTVSSGGGGSGGGGSGGGGSQTVVTQEPSLTVSPGGTVTLTCGSSTGAVTSGYYPNWVQQKPGQAPRGLIGGTKFLAPGTPARFSGSLLGGKAALTLSGVQPEDEAEYYCALWYSNRWVFGGGTKLTVL

SEQ ID NO: 620 - protein, 249 aa, Artificial Sequence
  Synthetic Polypeptide
EVQLLESGGGLVQPGGSLKLSCAASGFTFNVYAMNWVRQAPGKGLEWVARIRSKYNNYATYYADSVKKRFTISRDDSKNTAYLQMNNLKTEDTAVYYCVRHGNFGNSYISWWAYWGQGTLVTVSSGGGGSGGGGSGGGGSELVVTQEPSLTVSPGGTVTLTCGSSTGAVTSGYYPNWVQQKPGQAPRGLIGGTKFLAPGTPARFSGSLLGGKAALTLSGVQPEDEAEYYCALWYSNRWVFGGGTKLTVL

SEQ ID NO: 621 - protein, 14 aa, Artificial Sequence
  Synthetic Polypeptide
GSSTGAVTSGNYPN

SEQ ID NO: 622 - protein, 7 aa, Artificial Sequence
  Synthetic Polypeptide
GTKFLAP

SEQ ID NO: 623 - protein, 9 aa, Artificial Sequence
  Synthetic Polypeptide
VLWYSNRWV

SEQ ID NO: 624 - protein, 5 aa, Artificial Sequence
  Synthetic Polypeptide
SYAMN

SEQ ID NO: 625 - protein, 19 aa, Artificial Sequence
  Synthetic Polypeptide
RIRSKYNNYATYYADSVKG

SEQ ID NO: 626 - protein, 14 aa, Artificial Sequence
  Synthetic Polypeptide
HGNFGNSYVSWWAY

SEQ ID NO: 627 - protein, 125 aa, Artificial Sequence
  Synthetic Polypeptide
EVQLVESGGGLVQPGGSLKLSCAASGFTFNSYAMNWVRQAPGKGLEWVARIRSKYNNYATYYADSVKGRFTISRDDSKNTAYLQMNNLKTEDTAVYYCVRHGNFGNSYVSWWAYWGQGTLVTVSS

SEQ ID NO: 628 - protein, 125 aa, Artificial Sequence
  Synthetic Polypeptide
EVQLLESGGGLVQPGGSLKLSCAASGFTFNSYAMNWVRQAPGKGLEWVARIRSKYNNYATYYADSVKGRFTISRDDSKNTAYLQMNNLKTEDTAVYYCVRHGNFGNSYVSWWAYWGQGTLVTVSS

SEQ ID NO: 629 - protein, 109 aa, Artificial Sequence
  Synthetic Polypeptide
QTVVTQEPSLTVSPGGTVTLTCGSSTGAVTSGNYPNWVQQKPGQAPRGLIGGTKFLAPGTPARFSGSLLGGKAALTLSGVQPEDEAEYYCVLWYSNRWVFGGGTKLTVL

SEQ ID NO: 630 - protein, 109 aa, Artificial Sequence
  Synthetic Polypeptide
ELVVTQEPSLTVSPGGTVTLTCGSSTGAVTSGNYPNWVQQKPGQAPRGLIGGTKFLAPGTPARFSGSLLGGKAALTLSGVQPEDEAEYYCVLWYSNRWVFGGGTKLTVL

SEQ ID NO: 631 - protein, 249 aa, Artificial Sequence
  Synthetic Polypeptide
EVQLVESGGGLVQPGGSLKLSCAASGFTFNSYAMNWVRQAPGKGLEWVARIRSKYNNYATYYADSVKGRFTISRDDSKNTAYLQMNNLKTEDTAVYYCVRHGNFGNSYVSWWAYWGQGTLVTVSSGGGGSGGGGSGGGGSQTVVTQEPSLTVSPGGTVTLTCGSSTGAVTSGNYPNWVQQKPGQAPRGLIGGTKFLAPGTPARFSGSLLGGKAALTLSGVQPEDEAEYYCVLWYSNRWVFGGGTKLTVL

SEQ ID NO: 632 - protein, 249 aa, Artificial Sequence
  Synthetic Polypeptide
EVQLLESGGGLVQPGGSLKLSCAASGFTFNSYAMNWVRQAPGKGLEWVARIRSKYNNYATYYADSVKGRFTISRDDSKNTAYLQMNNLKTEDTAVYYCVRHGNFGNSYVSWWAYWGQGTLVTVSSGGGGSGGGGSGGGGSELVVTQEPSLTVSPGGTVTLTCGSSTGAVTSGNYPNWVQQKPGQAPRGLIGGTKFLAPGTPARFSGSLLGGKAALTLSGVQPEDEAEYYCVLWYSNRWVFGGGTKLTVL

SEQ ID NO: 633 - protein, 14 aa, Artificial Sequence
  Synthetic Polypeptide
GSSTGAVTSGNYPN

SEQ ID NO: 634 - protein, 7 aa, Artificial Sequence
  Synthetic Polypeptide
GTKFLAP

SEQ ID NO: 635 - protein, 9 aa, Artificial Sequence
  Synthetic Polypeptide
VLWYSNRWV

SEQ ID NO: 636 - protein, 5 aa, Artificial Sequence
  Synthetic Polypeptide
KYAMN

SEQ ID NO: 637 - protein, 19 aa, Artificial Sequence
  Synthetic Polypeptide
RIRSKYNNYATYYADSVKD

SEQ ID NO: 638 - protein, 14 aa, Artificial Sequence
  Synthetic Polypeptide
HGNFGNSYISYWAY

SEQ ID NO: 639 - protein, 125 aa, Artificial Sequence; identical to SEQ ID NO: 548
  Synthetic Polypeptide

SEQ ID NO: 640 - protein, 125 aa, Artificial Sequence; identical to SEQ ID NO: 549
  Synthetic Polypeptide

SEQ ID NO: 641 - protein, 109 aa, Artificial Sequence; identical to SEQ ID NO: 629
  Synthetic Polypeptide

SEQ ID NO: 642 - protein, 249 aa, Artificial Sequence
  Synthetic Polypeptide
EVQLVESGGGLVQPGGSLKLSCAASGFTFNKYAMNWVRQAPGKGLEWVARIRSKYNNYATYYADSVKDRFTISRDDSKNTAYLQMNNLKTEDTAVYYCVRHGNFGNSYISYWAYWGQGTLVTVSSGGGGSGGGGSGGGGSQTVVTQEPSLTVSPGGTVTLTCGSSTGAVTSGNYPNWVQQKPGQAPRGLIGGTKFLAPGTPARFSGSLLGGKAALTLSGVQPEDEAEYYCVLWYSNRWVFGGGTKLTVL

SEQ ID NO: 643 - protein, 249 aa, Artificial Sequence
  Synthetic Polypeptide
EVQLLESGGGLVQPGGSLKLSCAASGFTFNKYAMNWVRQAPGKGLEWVARIRSKYNNYATYYADSVKDRFTISRDDSKNTAYLQMNNLKTEDTAVYYCVRHGNFGNSYISYWAYWGQGTLVTVSSGGGGSGGGGSGGGGSELVVTQEPSLTVSPGGTVTLTCGSSTGAVTSGNYPNWVQQKPGQAPRGLIGGTKFLAPGTPARFSGSLLGGKAALTLSGVQPEDEAEYYCVLWYSNRWVFGGGTKLTVL

SEQ ID NO: 644 - protein, 125 aa, Artificial Sequence
  Synthetic Polypeptide
EVQLVESGGGLVQPGGSLRLSCAASGFTFNSYAMNWVRQAPGKGLEWVARIRSKYNNYATYYADSVKGRFTISRDDSKNTAYLQMNSLKTEDTAVYYCVRHGNFGNSYVSWWAYWGQGTLVTVSS

SEQ ID NO: 645 - protein, 109 aa, Artificial Sequence; identical to SEQ ID NO: 629
  Synthetic Polypeptide

SEQ ID NO: 646 - protein, 249 aa, Artificial Sequence
  Synthetic Polypeptide
EVQLVESGGGLVQPGGSLRLSCAASGFTFNSYAMNWVRQAPGKGLEWVARIRSKYNNYATYYADSVKGRFTISRDDSKNTAYLQMNSLKTEDTAVYYCVRHGNFGNSYVSWWAYWGQGTLVTVSSGGGGSGGGGSGGGGSQTVVTQEPSLTVSPGGTVTLTCGSSTGAVTSGNYPNWVQQKPGQAPRGLIGGTKFLAPGTPARFSGSLLGGKAALTLSGVQPEDEAEYYCVLWYSNRWVFGGGTKLTVL

SEQ ID NO: 647 - protein, 184 aa, Homo Sapiens
MLQMAGQCSQNEYFDSLLHACIPCQLRCSSNTPPLTCQRYCNASVTNSVKGTNAILWTCLGLSLIISLAVFVLMFLLRKINSEPLKDEFKNTGSGLLGMANIDLEKSRTGDEIILPRGLEYTVEECTCEDCIKSKPKVDSDHCFPLPAMEEGATILVTTKTNDYCKSLPAALSATEIEKSISAR

SEQ ID NO: 648 - protein, 183 aa, Rhesus macaque
MLQMARQCSQNEYFDSLLHDCKPCQLRCSSTPPLTCQRYCNASMTNSVKGMNAILWTCLGLSLIISLAVFVLTFLLRKMSSEPLKDEFKNTGSGLLGMANIDLEKGRTGDEIVLPRGLEYTVEECTCEDCIKNKPKVDSDHCFPLPAMEEGATILVTTKTNDYCNSLSAALSVTEIEKSISAR

SEQ ID NO: 649 - protein, 54 aa, Homo Sapiens
MLQMAGQCSQNEYFDSLLHACIPCQLRCSSNTPPLTCQRYCNASVTNSVKGTNA

SEQ ID NO: 650 - protein, 53 aa, Rhesus macaque
MLQMARQCSQNEYFDSLLHDCKPCQLRCSSTPPLTCQRYCNASMTNSVKGMNA

SEQ ID NO: 651 - protein, 18 aa, Homo Sapiens
CQLRCSSNTPPLTCQRYC

SEQ ID NO: 652 - protein, 17 aa, Rhesus macaque
CQLRCSSTPPLTCQRYC

SEQ ID NO: 653 - protein, 105 aa, Homo Sapiens
QDGNEEMGGITQTPYKVSISGTTVILTCPQYPGSEILWQHNDKNIGGDEDDKNIGSDEDHLSLKEFSELEQSGYYVCYPRGSKPEDANFYLYLRARVCENCMEMD

SEQ ID NO: 654 - protein, 27 aa, Homo Sapiens
QDGNEEMGGITQTPYKVSISGTTVILT

SEQ ID NO: 655 - protein, 96 aa, Callithrix jacchus
QDGNEEMGDTTQNPYKVSISGTTVTLTCPRYDGHEIKWLVNSQNKEGHEDHLLLEDFSEMEQSGYYACLSKETPAEEASHYLYLKARVCENCVEVD

SEQ ID NO: 656 - protein, 27 aa, Callithrix jacchus
QDGNEEMGDTTQNPYKVSISGTTVTLT

SEQ ID NO: 657 - protein, 96 aa, Saguinus oedipus; identical to SEQ ID NO: 655

SEQ ID NO: 658 - protein, 27 aa, Saguinus oedipus
QDGNEEMGDTTQNPYKVSISGTTVTLT

SEQ ID NO: 659 - protein, 96 aa, Saimiri sciureus
QDGNEEIGDTTQNPYKVSISGTTVTLTCPRYDGQEIKWLVNDQNKEGHEDHLLLEDFSEMEQSGYYACLSKETPTEEASHYLYLKARVCENCVEVD

SEQ ID NO: 660 - protein, 27 aa, Saimiri sciureus
QDGNEEIGDTTQNPYKVSISGTTVTLT

SEQ ID NO: 661 - protein, 504 aa, Artificial Sequence
  Synthetic Polypeptide
QVQLVQSGAEVKKPGASVKVSCKASGYTFTNHIIHWVRQAPGQGLEWMGYINPYPGYHAYNEKFQGRATMTSDTSTSTVYMELSSLRSEDTAVYYCARDGYYRDTDVLDYWGQGTLVTVSSGGGGSGGGGSGGGGSDIQMTQSPSSLSASVGDRVTITCQASQDISNYLNWYQQKPGKAPKLLIYYTSRLHTGVPSRFSGSGSGTDFTFTISSLEPEDIATYYCQQGNTLPWTFGQGTKVEIKSGGGGSEVQLVESGGGLVQPGGSLKLSCAASGFTFNKYAMNWVRQAPGKGLEWVARIRSKYNNYATYYADSVKDRFTISRDDSKNTAYLQMNNLKTEDTAVYYCVRHGNFGNSYISYWAYWGQGTLVTVSSGGGGSGGGGSGGGGSQTVVTQEPSLTVSPGGTVTLTCGSSTGAVTSGNYPNWVQQKPGQAPRGLIGGTKFLAPGTPARFSGSLLGGKAALTLSGVQPEDEAEYYCVLWYSNRWVFGGGTKLTVLHHHHHH

SEQ ID NO: 662 - protein, 5 aa, Artificial Sequence
  Synthetic Polypeptide
HHHHH

SEQ ID NO: 663 - protein, 6 aa, Artificial Sequence
  Synthetic Polypeptide
HHHHHH

SEQ ID NO: 664 - protein, 7 aa, Artificial Sequence
  Synthetic Polypeptide
HHHHHHH

SEQ ID NO: 665 - protein, 8 aa, Artificial Sequence
  Synthetic Polypeptide
HHHHHHHH

SEQ ID NO: 666 - protein, 6 aa, Artificial Sequence
  Synthetic Polypeptide
DTYRYI

SEQ ID NO: 667 - protein, 6 aa, Artificial Sequence
  Synthetic Polypeptide
TDFYLK

SEQ ID NO: 668 - protein, 11 aa, Artificial Sequence
  Synthetic Polypeptide
MASMTGGQQMG

SEQ ID NO: 669 - protein, 14 aa, Artificial Sequence
  Synthetic Polypeptide
GKPIPNPLLGLDST

SEQ ID NO: 670 - protein, 6 aa, Artificial Sequence
  Synthetic Polypeptide
QYPALT

SEQ ID NO: 671 - protein, 10 aa, Artificial Sequence
  Synthetic Polypeptide
SSTSSDFRDR

SEQ ID NO: 672 - protein, 7 aa, Artificial Sequence
  Synthetic Polypeptide
DYKDDDK

SEQ ID NO: 673 - protein, 6 aa, Artificial Sequence
  Synthetic Polypeptide
EYMPME

SEQ ID NO: 674 - protein, 6 aa, Artificial Sequence
  Synthetic Polypeptide
EFMPME

SEQ ID NO: 675 - protein, 19 aa, Artificial Sequence
  Synthetic Polypeptide
KDHLIHNVHKEFHAHAHNK

SEQ ID NO: 676 - protein, 8 aa, Artificial Sequence
  Synthetic Polypeptide
QPELAPED

SEQ ID NO: 677 - protein, 11 aa, Artificial Sequence
  Synthetic Polypeptide
KPPTPPPEPET

SEQ ID NO: 678 - protein, 11 aa, Artificial Sequence
  Synthetic Polypeptide
CEQKLISEEDL

SEQ ID NO: 679 - protein, 9 aa, Artificial Sequence
  Synthetic Polypeptide
NANNPDWDF

SEQ ID NO: 680 - protein, 15 aa, Artificial Sequence
  Synthetic Polypeptide
KETAAAKFERQHMDS

SEQ ID NO: 681 - protein, 8 aa, Artificial Sequence
  Synthetic Polypeptide
WSHPQFEK

SEQ ID NO: 682 - protein, 9 aa, Artificial Sequence
  Synthetic Polypeptide
AWAHPQPGG

SEQ ID NO: 683 - protein, 6 aa, Artificial Sequence
  Synthetic Polypeptide
HTTPHH

SEQ ID NO: 684 - protein, 11 aa, Artificial Sequence
  Synthetic Polypeptide
YTDIEMNRLGK

SEQ ID NO: 685 - protein, 12 aa, Artificial Sequence
  Synthetic Polypeptide
EDQVDPRLIDGK

SEQ ID NO: 686 - protein, 4 aa, Artificial Sequence
  Synthetic Polypeptide
GGGG

SEQ ID NO: 687 - protein, 5 aa, Artificial Sequence
  Synthetic Polypeptide
GGGGS

SEQ ID NO: 688 - protein, 5 aa, Artificial Sequence
  Synthetic Polypeptide
GGGGQ

SEQ ID NO: 689 - protein, 6 aa, Artificial Sequence
  Synthetic Polypeptide
SGGGGS

SEQ ID NO: 690 - protein, 6 aa, Artificial Sequence
  Synthetic Polypeptide
PGGGGS

SEQ ID NO: 691 - protein, 6 aa, Artificial Sequence
  Synthetic Polypeptide
PGGDGS

SEQ ID NO: 692 - protein, 9 aa, Artificial Sequence
  Synthetic Polypeptide
GGGGSGGGS

SEQ ID NO: 693 - protein, 10 aa, Artificial Sequence
  Synthetic Polypeptide
GGGGSGGGGS

SEQ ID NO: 694 - protein, 15 aa, Artificial Sequence
  Synthetic Polypeptide
GGGGSGGGGSGGGGS

SEQ ID NO: 695 - protein, 20 aa, Artificial Sequence
  Synthetic Polypeptide
GGGGSGGGGSGGGGSGGGGS

SEQ ID NO: 696 - protein, 25 aa, Artificial Sequence
  Synthetic Polypeptide
GGGGSGGGGSGGGGSGGGGSGGGGS

SEQ ID NO: 697 - protein, 30 aa, Artificial Sequence
  Synthetic Polypeptide
GGGGSGGGGSGGGGSGGGGSGGGGSGGGGS

SEQ ID NO: 698 - protein, 35 aa, Artificial Sequence
  Synthetic Polypeptide
GGGGSGGGGSGGGGSGGGGSGGGGSGGGGSGGGGS

SEQ ID NO: 699 - protein, 40 aa, Artificial Sequence
  Synthetic Polypeptide
GGGGSGGGGSGGGGSGGGGSGGGGSGGGGSGGGGSGGGGS
